United States Patent Application Publication US 2021/0254182 A1 - sequence listing, part 10

SEQ ID NO: 93 - DNA, 4785000 bp, Phytopthora sojae (residues 1,595,001-3,190,000 of 4,785,000)
  misc_feature (5100)..(12701): n is a, c, g, or t
  misc_feature (31089)..(31381): n is a, c, g, or t
  misc_feature (38034)..(39568): n is a, c, g, or t
  misc_feature (55412)..(59211): n is a, c, g, or t
  misc_feature (61801)..(66085): n is a, c, g, or t
  misc_feature (68521)..(96956): n is a, c, g, or t
  misc_feature (100033)..(100458): n is a, c, g, or t
  misc_feature (120210)..(120309): n is a, c, g, or t
  misc_feature (315352)..(315451): n is a, c, g, or t
  misc_feature (520040)..(525257): n is a, c, g, or t
  misc_feature (527430)..(527529): n is a, c, g, or t
  misc_feature (768241)..(768340): n is a, c, g, or t
  misc_feature (879466)..(879565): n is a, c, g, or t
  misc_feature (893446)..(893545): n is a, c, g, or t
  misc_feature (1044472)..(1044571): n is a, c, g, or t
  misc_feature (1229068)..(1229167): n is a, c, g, or t
  misc_feature (1574315)..(1593657): n is a, c, g, or t
  misc_feature (1598002)..(1614813): n is a, c, g, or t
  misc_feature (1618518)..(1618617): n is a, c, g, or t
  misc_feature (1632032)..(1632131): n is a, c, g, or t
  misc_feature (1637455)..(1646437): n is a, c, g, or t
  misc_feature (1650421)..(1651525): n is a, c, g, or t
  misc_feature (1655518)..(1665517): n is a, c, g, or t
  misc_feature (1682426)..(1682655): n is a, c, g, or t
  misc_feature (1689748)..(1695112): n is a, c, g, or t
  misc_feature (2039096)..(2039195): n is a, c, g, or t
  misc_feature (2060395)..(2069697): n is a, c, g, or t
  misc_feature (2079858)..(2079957): n is a, c, g, or t
  misc_feature (2331525)..(2331624): n is a, c, g, or t
  misc_feature (2343519)..(2349643): n is a, c, g, or t
  misc_feature (2354986)..(2361597): n is a, c, g, or t
  misc_feature (2612232)..(2612331): n is a, c, g, or t
  misc_feature (2621135)..(2621234): n is a, c, g, or t
  misc_feature (2634116)..(2634352): n is a, c, g, or t
  misc_feature (2688501)..(2700015): n is a, c, g, or t
  misc_feature (2702562)..(2703094): n is a, c, g, or t
  misc_feature (2706885)..(2707378): n is a, c, g, or t
  misc_feature (3102932)..(3103031): n is a, c, g, or t
  misc_feature (3288177)..(3288276): n is a, c, g, or t
  misc_feature (3334997)..(3335096): n is a, c, g, or t
  misc_feature (3372136)..(3374716): n is a, c, g, or t
  misc_feature (3380009)..(3398767): n is a, c, g, or t
  misc_feature (3402553)..(3407783): n is a, c, g, or t
  misc_feature (3414864)..(3415590): n is a, c, g, or t
  misc_feature (3586226)..(3586325): n is a, c, g, or t
  misc_feature (3768894)..(3768993): n is a, c, g, or t
  misc_feature (3855179)..(3857074): n is a, c, g, or t
  misc_feature (3859551)..(3859926): n is a, c, g, or t
  misc_feature (4325012)..(4325111): n is a, c, g, or t
  misc_feature (4337405)..(4340559): n is a, c, g, or t
  misc_feature (4343234)..(4347453): n is a, c, g, or t
  misc_feature (4351673)..(4351789): n is a, c, g, or t
  misc_feature (4358531)..(4360823): n is a, c, g, or t
  misc_feature (4367602)..(4413309): n is a, c, g, or t
  misc_feature (4416324)..(4440057): n is a, c, g, or t
  misc_feature (4445940)..(4446039): n is a, c, g, or t
  misc_feature (4452185)..(4452457): n is a, c, g, or t
  misc_feature (4455887)..(4456136): n is a, c, g, or t
  misc_feature (4464596)..(4466633): n is a, c, g, or t
  misc_feature (4470768)..(4470867): n is a, c, g, or t
  misc_feature (4477508)..(4535822): n is a, c, g, or t
  misc_feature (4538201)..(4541672): n is a, c, g, or t
  misc_feature (4546379)..(4555874): n is a, c, g, or t
  misc_feature (4560307)..(4561100): n is a, c, g, or t
  misc_feature (4663568)..(4663667): n is a, c, g, or t
  misc_feature (4689833)..(4690205): n is a, c, g, or t
  misc_feature (4694054)..(4704053): n is a, c, g, or t
  misc_feature (4708607)..(4708807): n is a, c, g, or t
  misc_feature (4717807)..(4720493): n is a, c, g, or t
  misc_feature (4723566)..(4723713): n is a, c, g, or t
tcgtcgaccacatggtggtagtccgcgtccatgtggagcaacatcagtccgaacgcgatgttgctcgacttgacgtagtcgtccttggcccgcgagtccgtgaagctcggcgtcgtctcgcggttcacgacatgccacgtcgacttggtcaggaacacgccacgcatgtagcggttccacgtcgcgtagttgtccccgttgaacttgtcaatggagaccttggtcgaggcgtcttgggcagaggacatggtgcttgggctcataacctgatggaaggtatggatcttggacacgaagctcggacgaagcggagggagggacgtcgcagacggcgggaccggagcgaaggcacttgaggggtagaatgaagattcgaaagtgattgaattgttggagcttacaccctactgttatagacacgcgaccctgcgtcctatcacctagtgcatctaatcaaccatcactcaccggtgttcatccaatcatcctactcgtctaatcatcggtggcgtaaacaacttaccgtaatcaccataatcaacgtgggttcggattggaccggttcgggctaaccggttaatgggtacaactggtacacagtacccaagaccagcaaccctcaatagttgaggacctcgttgcaatgatgcaagacgttgccgccttccgacatctccatgctgaagagttggcgcttcaggtagatgcgtccagccttctgcgaaccaccgtacagcgtcttcaggcgcgtccacgcaacccacgcttcctcgcagtcgtcgaccacatggtggtagtccgcgtccatgtggagcaacatcagtccgaacgcgatgttgctcgacttgacgtagtcgtccttggcccgcgagtccgtgaagctcggcgtcgtctcgcggttcacgacatgccacgtcgacttggtcaggaacacgccacgcatgtagcggttccacgtcgcgtagttgtccccgttgaacttgtcaatggagaccttggtcgaggcgtcttgggcagaggacatggtgcttgggctcataacctgatggaaggtatggatcttggacacgaagctcggacgaagcggagggagggacgtcgcagacggcgggaccggagcgaaggcacttgaggggtagaatgaagattcgaaagtgattgaattgttggagcttacaccctactgttatagacacgcgaccctgcgtcctatcacctagtgcatctaatcaaccatcactcatcctactcgtctaatcatcggtggcgtaaacaacttaccgtaatcaccataatcaacgtgggttcggattggaccggttcgggctaaccggttaatgggtacaactggtacacagtacccaagaccagcaaccctcaatagttgaggacctcgttgcaatgatgcaagacgttgccgccttccgacatctccatgctgaagagttggcgcttcaggtagatgcgtccagccttctgcgaaccaccgtacagcgtcttcaggcgcgtccacgcaacccacgcttcctcgcagtcgtcgaccacatggtggtagtccgcgtccatgtggagcaacatcagtccgaacgcgatgttgctcgacttgacgtagtcgtccttggcccgcgagtccgtgaagctcggcgtcgtctcgcggttcacgacatgccacgtcgacttggtcaggaacacgccacgcatgtagcggttccacgtcgcgtagttgtccccgttgaacttgtcaatggagaccttggtcgaggcgtcttgggcagaggacatggtgcttgggctcataacctgatggaaggtatggatcttggacacgaagctcggacgaagcggagggagggacgtcgcagacggcgggaccggagcgaaggcacttgaggggtagaatgaagattcgaaagtgattgaattgttggagcttacaccctactgttatagacacgcgaccctgcgtcctatcacctagtgcatctaatcaaccatcactcaccggtgttcatccaatcatcctactcgtctaatcatcggtggcgtaaacaacttaccgtaatcaccataatcaacgtgggttcggattggaccggttcgggttaaccggttaatgggtacaactggtacacagtacccaagaccagcaaccctcaatagttgaggacctcgttgcaatgatgcaagacgttgccgccttccgacatctccatgctgaagagttggcgcttcaggtagatgcgtccagccttctgcgaaccaccgtacagcgtcttcaggcgcgtccacgcaacccacgcttcctcgcagtcgtcgaccacatggtggtagtccgcgtccatgtggagcaacatcagtccgaacgcgatgttgctcgacttgacgtagtcgtccttggcccgcgagtccgtgaagctcggcgtcgtctcgcggttcacgacatgccacgtcgacttggtcaggaacacgccacgcatgtagcggttccacgtcgcgtagttgtccccgttgaacttgtcaatggagaccttggtcgaggcgtcttgggcagaggacatggtgcttgggctcataacctgatggaaggtatggatcttggacacgaagctcggacgaagcggagggagggacgtcgcagacggcgggaccggagcgaaggcacttgaggggtagaatgaagattcgaaagtgattgaattgttggagcttacaccctactgttatagacacgcgaccctgcgtcctatcacctagtgcatctaatcaaccatcactcaccggtgttcatccaatcatcctactcgtataatcatcggtggcgtaaacaacttaccgtaatcaccataatcaacgtgggttcggattggaccggttcgggttaaccggttaatgggtacaactggtacacagtacccaagaccagcaaccctcaataaaggacgcattatggagcgctgatgttcagagtaatgggtgcgatttttcaactagccacattatannnnnnnnnnnnnnnnnnnnnnnnnnnnnnnnnnnnnnnnnnnnnnnnnnnnnnnnnnnnnnnnnnnnnnnnnnnnnnnnnnnnnnnnnnnnnnnnnnnnnnnnnnnnnnnnnnnnnnnnnnnnnnnnnnnnnnnnnnnnnnnnnnnnnnnnnnnnnnnnnnnnnnnnnnnnnnnnnnnnnnnnnnnnnnnnnnnnnnnnnnnnnnnnnnnnnnnnnnnnnnnnnnnnnnnnnnnnnnnnnnnnnnnnnnnnnnnnnnnnnnnnnnnnnnnnnnnnnnnnnnnnnnnnnnnnnnnnnnnnnnnnnnnnnnnnnnnnnnnnnnnnnnnnnnnnnnnnnnnnnnnnnnnnnnnnnnnnnnnnnnnnnnnnnnnnnnnnnnnnnnnnnnnnnnnnnnnnnnnnnnnnnnnnnnnnnnnnnnnnnnnnnnnnnnnnnnnnnnnnnnnnnnnnnnnnnnnnnnnnnnnnnnnnnnnnnnnnnnnnnnnnnnnnnnnnnnnnnnnnnnnnnnnnnnnnnnnnnnnnnnnnnnnnnnnnnnnnnnnnnnnnnnnnnnnnnnnnnnnnnnnnnnnnnnnnnnnnnnnnnnnnnnnnnnnnnnnnnnnnnnnnnnnnnnnnnnnnnnnnnnnnnnnnnnnnnnnnnnnnnnnnnnnnnnnnnnnnnnnnnnnnnnnnnnnnnnnnnnnnnnnnnnnnnnnnnnnnnnnnnnnnnnnnnnnnnnnnnnnnnnnnnnnnnnnnnnnnnnnnnnnnnnnnnnnnnnnnnnnnnnnnnnnnnnnnnnnnnnnnnnnnnnnnnnnnnnnnnnnnnnnnnnnnnnnnnnnnnnnnnnnnnnnnnnnnnnnnnnnnnnnnnnnnnnnnnnnnnnnnnnnnnnnnnnnnnnnnnnnnnnnnnnnnnnnnnnnnnnnnnnnnnnnnnnnnnnnnnnnnnnnnnnnnnnnnnnnnnnnnnnnnnnnnnnnnnnnnnnnnnnnnnnnnnnnnnnnnnnnnnnnnnnnnnnnnnnnnnnnnnnnnnnnnnnnnnnnnnnnnnnnnnnnnnnnnnnnnnnnnnnnnnnnnnnnnnnnnnnnnnnnnnnnnnnnnnnnnnnnnnnnnnnnnnnnnnnnnnnnnnnnnnnnnnnnnnnnnnnnnnnnnnnnnnnnnnnnnnnnnnnnnnnnnnnnnnnnnnnnnnnnnnnnnnnnnnnnnnnnnnnnnnnnnnnnnnnnnnnnnnnnnnnnnnnnnnnnnnnnnnnnnnnnnnnnnnnnnnnnnnnnnnnnnnnnnnnnnnnnnnnnnnnnnnnnnnnnnnnnnnnnnnnnnnnnnnnnnnnnnnnnnnnnnnnnnnnnnnnnnnnnnnnnnnnnnnnnnnnnnnnnnnnnnnnnnnnnnnnnnnnnnnnnnnnnnnnnnnnnnnnnnnnnnnnnnnnnnnnnnnnnnnnnnnnnnnnnnnnnnnnnnnnnnnnnnnnnnnnnnnnnnnnnnnnnnnnnnnnnnnnnnnnnnnnnnnnnnnnnnnnnnnnnnnnnnnnnnnnnnnnnnnnnnnnnnnnnnnnnnnnnnnnnnnnnnnnnnnnnnnnnnnnnnnnnnnnnnnnnnnnnnnnnnnnnnnnnnnnnnnnnnnnnnnnnnnnnnnnnnnnnnnnnnnnnnnnnnnnnnnnnnnnnnnnnnnnnnnnnnnnnnnnnnnnnnnnnnnnnnnnnnnnnnnnnnnnnnnnnnnnnnnnnnnnnnnnnnnnnnnnnnnnnnnnnnnnnnnnnnnnnnnnnnnnnnnnnnnnnnnnnnnnnnnnnnnnnnnnnnnnnnnnnnnnnnnnnnnnnnnnnnnnnnnnnnnnnnnnnnnnnnnnnnnnnnnnnnnnnnnnnnnnnnnnnnnnnnnnnnnnnnnnnnnnnnnnnnnnnnnnnnnnnnnnnnnnnnnnnnnnnnnnnnnnnnnnnnnnnnnnnnnnnnnnnnnnnnnnnnnnnnnnnnnnnnnnnnnnnnnnnnnnnnnnnnnnnnnnnnnnnnnnnnnnnnnnnnnnnnnnnnnnnnnnnnnnnnnnnnnnnnnnnnnnnnnnnnnnnnnnnnnnnnnnnnnnnnnnnnnnnnnnnnnnnnnnnnnnnnnnnnnnnnnnnnnnnnnnnnnnnnnnnnnnnnnnnnnnnnnnnnnnnnnnnnnnnnnnnnnnnnnnnnnnnnnnnnnnnnnnnnnnnnnnnnnnnnnnnnnnnnnnnnnnnnnnnnnnnnnnnnnnnnnnnnnnnnnnnnnnnnnnnnnnnnnnnnnnnnnnnnnnnnnnnnnnnnnnnnnnnnnnnnnnnnnnnnnnnnnnnnnnnnnnnnnnnnnnnnnnnnnnnnnnnnnnnnnnnnnnnnnnnnnnnnnnnnnnnnnnnnnnnnnnnnnnnnnnnnnnnnnnnnnnnnnnnnnnnnnnnnnnnnnnnnnnnnnnnnnnnnnnnnnnnnnnnnnnnnnnnnnnnnnnnnnnnnnnnnnnnnnnnnnnnnnnnnnnnnnnnnnnnnnnnnnnnnnnnnnnnnnnnnnnnnnnnnnnnnnnnnnnnnnnnnnnnnnnnnnnnnnnnnnnnnnnnnnnnnnnnnnnnnnnnnnnnnnnnnnnnnnnnnnnnnnnnnnnnnnnnnnnnnnnnnnnnnnnnnnnnnnnnnnnnnnnnnnnnnnnnnnnnnnnnnnnnnnnnnnnnnnnnnnnnnnnnnnnnnnnnnnnnnnnnnnnnnnnnnnnnnnnnnnnnnnnnnnnnnnnnnnnnnnnnnnnnnnnnnnnnnnnnnnnnnnnnnnnnnnnnnnnnnnnnnnnnnnnnnnnnnnnnnnnnnnnnnnnnnnnnnnnnnnnnnnnnnnnnnnnnnnnnnnnnnnnnnnnnnnnnnnnnnnnnnnnnnnnnnnnnnnnnnnnnnnnnnnnnnnnnnnnnnnnnnnnnnnnnnnnnnnnnnnnnnnnnnnnnnnnnnnnnnnnnnnnnnnnnnnnnnnnnnnnnnnnnnnnnnnnnnnnnnnnnnnnnnnnnnnnnnnnnnnnnnnnnnnnnnnnnnnnnnnnnnnnnnnnnnnnnnnnnnnnnnnnnnnnnnnnnnnnnnnnnnnnnnnnnnnnnnnnnnnnnnnnnnnnnnnnnnnnnnnnnnnnnnnnnnnnnnnnnnnnnnnnnnnnnnnnnnnnnnnnnnnnnnnnnnnnnnnnnnnnnnnnnnnnnnnnnnnnnnnnnnnnnnnnnnnnnnnnnnnnnnnnnnnnnnnnnnnnnnnnnnnnnnnnnnnnnnnnnnnnnnnnnnnnnnnnnnnnnnnnnnnnnnnnnnnnnnnnnnnnnnnnnnnnnnnnnnnnnnnnnnnnnnnnnnnnnnnnnnnnnnnnnnnnnnnnnnnnnnnnnnnnnnnnnnnnnnnnnnnnnnnnnnnnnnnnnnnnnnnnnnnnnnnnnnnnnnnnnnnnnnnnnnnnnnnnnnnnnnnnnnnnnnnnnnnnnnnnnnnnnnnnnnnnnnnnnnnnnnnnnnnnnnnnnnnnnnnnnnnnnnnnnnnnnnnnnnnnnnnnnnnnnnnnnnnnnnnnnnnnnnnnnnnnnnnnnnnnnnnnnnnnnnnnnnnnnnnnnnnnnnnnnnnnnnnnnnnnnnnnnnnnnnnnnnnnnnnnnnnnnnnnnnnnnnnnnnnnnnnnnnnnnnnnnnnnnnnnnnnnnnnnnnnnnnnnnnnnnnnnnnnnnnnnnnnnnnnnnnnnnnnnnnnnnnnnnnnnnnnnnnnnnnnnnnnnnnnnnnnnnnnnnnnnnnnnnnnnnnnnnnnnnnnnnnnnnnnnnnnnnnnnnnnnnnnnnnnnnnnnnnnnnnnnnnnnnnnnnnnnnnnnnnnnnnnnnnnnnnnnnnnnnnnnnnnnnnnnnnnnnnnnnnnnnnnnnnnnnnnnnnnnnnnnnnnnnnnnnnnnnnnnnnnnnnnnnnnnnnnnnnnnnnnnnnnnnnnnnnnnnnnnnnnnnnnnnnnnnnnnnnnnnnnnnnnnnnnnnnnnnnnnnnnnnnnnnnnnnnnnnnnnnnnnnnnnnnnnnnnnnnnnnnnnnnnnnnnnnnnnnnnnnnnnnnnnnnnnnnnnnnnnnnnnnnnnnnnnnnnnnnnnnnnnnnnnnnnnnnnnnnnnnnnnnnnnnnnnnnnnnnnnnnnnnnnnnnnnnnnnnnnnnnnnnnnnnnnnnnnnnnnnnnnnnnnnnnnnnnnnnnnnnnnnnnnnnnnnnnnnnnnnnnnnnnnnnnnnnnnnnnnnnnnnnnnnnnnnnnnnnnnnnnnnnnnnnnnnnnnnnnnnnnnnnnnnnnnnnnnnnnnnnnnnnnnnnnnnnnnnnnnnnnnnnnnnnnnnnnnnnnnnnnnnnnnnnnnnnnnnnnnnnnnnnnnnnnnnnnnnnnnnnnnnnnnnnnnnnnnnnnnnnnnnnnnnnnnnnnnnnnnnnnnnnnnnnnnnnnnnnnnnnnnnnnnnnnnnnnnnnnnnnnnnnnnnnnnnnnnnnnnnnnnnnnnnnnnnnnnnnnnnnnnnnnnnnnnnnnnnnnnnnnnnnnnnnnnnnnnnnnnnnnnnnnnnnnnnnnnnnnnnnnnnnnnnnnnnnnnnnnnnnnnnnnnnnnnnnnnnnnnnnnnnnnnnnnnnnnnnnnnnnnnnnnnnnnnnnnnnnnnnnnnnnnnnnnnnnnnnnnnnnnnnnnnnnnnnnnnnnnnnnnnnnnnnnnnnnnnnnnnnnnnnnnnnnnnnnnnnnnnnnnnnnnnnnnnnnnnnnnnnnnnnnnnnnnnnnnnnnnnnnnnnnnnnnnnnnnnnnnnnnnnnnnnnnnnnnnnnnnnnnnnnnnnnnnnnnnnnnnnnnnnnnnnnnnnnnnnnnnnnnnnnnnnnnnnnnnnnnnnnnnnnnnnnnnnnnnnnnnnnnnnnnnnnnnnnnnnnnnnnnnnnnnnnnnnnnnnnnnnnnnnnnnnnnnnnnnnnnnnnnnnnnnnnnnnnnnnnnnnnnnnnnnnnnnnnnnnnnnnnnnnnnnnnnnnnnnnnnnnnnnnnnnnnnnnnnnnnnnnnnnnnnnnnnnnnnnnnnnnnnnnnnnnnnnnnnnnnnnnnnnnnnnnnnnnnnnnnnnnnnnnnnnnnnnnnnnnnnnnnnnnnnnnnnnnnnnnnnnnnnnnnnnnnnnnnnnnnnnnnnnnnnnnnnnnnnnnnnnnnnnnnnnnnnnnnnnnnnnnnnnnnnnnnnnnnnnnnnnnnnnnnnnnnnnnnnnnnnnnnnnnnnnnnnnnnnnnnnnnnnnnnnnnnnnnnnnnnnnnnnnnnnnnnnnnnnnnnnnnnnnnnnnnnnnnnnnnnnnnnnnnnnnnnnnnnnnnnnnnnnnnnnnnnnnnnnnnnnnnnnnnnnnnnnnnnnnnnnnnnnnnnnnnnnnnnnnnnnnnnnnnnnnnnnnnnnnnnnnnnnnnnnnnnnnnnnnnnnnnnnnnnnnnnnnnnnnnnnnnnnnnnnnnnnnnnnnnnnnnnnnnnnnnnnnnnnnnnnnnnnnnnnnnnnnnnnnnnnnnnnnnnnnnnnnnnnnnnnnnnnnnnnnnnnnnnnnnnnnnnnnnnnnnnnnnnnnnnnnnnnnnnnnnnnnnnnnnnnnnnnnnnnnnnnnnnnnnnnnnnnnnnnnnnnnnnnnnnnnnnnnnnnnnnnnnnnnnnnnnnnnnnnnnnnnnnnnnnnnnnnnnnnnnnnnnnnnnnnnnnnnnnnnnnnnnnnnnnnnnnnnnnnnnnnnnnnnnnnnnnnnnnnnnnnnnnnnnnnnnnnnnnnnnnnnnnnnnnnnnnnnnnnnnnnnnnnnnnnnnnnnnnnnnnnnnnnnnnnnnnnnnnnnnnnnnnnnnnnnnnnnnnnnnnnnnnnnnnnnnnnnnnnnnnnnnnnnnnnnnnnnnnnnnnnnnnnnnnnnnnnnnnnnnnnnnnnnnnnnnnnnnnnnnnnnnnnnnnnnnnnnnnnnnnnnnnnnnnnnnnnnnnnnnnnnnnnnnnnnnnnnnnnnnnnnnnnnnnnnnnnnnnnnnnnnnnnnnnnnnnnnnnnnnnnnnnnnnnnnnnnnnnnnnnnnnnnnnnnnnnnnnnnnnnnnnnnnnnnnnnnnnnnnnnnnnnnnnnnnnnnnnnnnnnnnnnnnnnnnnnnnnnnnnnnnnnnnnnnnnnnnnnnnnnnnnnnnnnnnnnnnnnnnnnnnnnnnnnnnnnnnnnnnnnnnnnnnnnnnnnnnnnnnnnnnnnnnnnnnnnnnnnnnnnnnnnnnnnnnnnnnnnnnnnnnnnnnnnnnnnnnnnnnnnnnnnnnnnnnnnnnnnnnnnnnnnnnnnnnnnnnnnnnnnnnnnnnnnnnnnnnnnnnnnnnnnnnnnnnnnnnnnnnnnnnnnnnnnnnnnnnnnnnnnnnnnnnnnnnnnnnnnnnnnnnnnnnnnnnnnnnnnnnnnnnnnnnnnnnnnnnnnnnnnnnnnnnnnnnnnnnnnnnnnnnnnnnnnnnnnnnnnnnnnnnnnnnnnnnnnnnnnnnnnnnnnnnnnnnnnnnnnnnnnnnnnnnnnnnnnnnnnnnnnnnnnnnnnnnnnnnnnnnnnnnnnnnnnnnnnnnnnnnnnnnnnnnnnnnnnnnnnnnnnnnnnnnnnnnnnnnnnnnnnnnnnnnnnnnnnnnnnnnnnnnnnnnnnnnnnnnnnnnnnnnnnnnnnnnnnnnnnnnnnnnnnnnnnnnnnnnnnnnnnnnnnnnnnnnnnnnnnnnnnnnnnnnnnnnnnnnnnnnnnnnnnnnnnnnnnnnnnnnnnnnnnnnnnnnnnnnnnnnnnnnnnnnnnnnnnnnnnnnnnnnnnnnnnnnnnnnnnnnnnnnnnnnnnnnnnnnnnnnnnnnnnnnnnnnnnnnnnnnnnnnnnnnnnnnnnnnnnnnnnnnnnnnnnnnnnnnnnnnnnnnnnnnnnnnnnnnnnnnnnnnnnnnnnnnnnnnnnnnnnnnnnnnnnnnnnnnnnnnnnnnnnnnnnnnnnnnnnnnnnnnnnnnnnnnnnnnnnnnnnnnnnnnnnnnnnnnnnnnnnnnnnnnnnnnnnnnnnnnnnnnnnnnnnnnnnnnnnnnnnnnnnnnnnnnnnnnnnnnnnnnnnnnnnnnnnnnnnnnnnnnnnnnnnnnnnnnnnnnnnnnnnnnnnnnnnnnnnnnnnnnnnnnnnnnnnnnnnnnnnnnnnnnnnnnnnnnnnnnnnnnnnnnnnnnnnnnnnnnnnnnnnnnnnnnnnnnnnnnnnnnnnnnnnnnnnnnnnnnnnnnnnnnnnnnnnnnnnnnnnnnnnnnnnnnnnnnnnnnnnnnnnnnnnnnnnnnnnnnnnnnnnnnnnnnnnnnnnnnnnnnnnnnnnnnnnnnnnnnnnnnnnnnnnnnnnnnnnnnnnnnnnnnnnnnnnnnnnnnnnnnnnnnnnnnnnnnnnnnnnnnnnnnnnnnnnnnnnnnnnnnnnnnnnnnnnnnnnnnnnnnnnnnnnnnnnnnnnnnnnnnnnnnnnnnnnnnnnnnnnnnnnnnnnnnnnnnnnnnnnnnnnnnnnnnnnnnnnnnnnnnnnnnnnnnnnnnnnnnnnnnnnnnnnnnnnnnnnnnnnnnnnnnnnnnnnnnnnnnnnnnnnnnnnnnnnnnnnnnnnnnnnnnnnnnnnnnnnnnnnnnnnnnnnnnnnnnnnnnnnnnnnnnnnnnnnnnnnnnnnnnnnnnnnnnnnnnnnnnnnnnnnnnnnnnnnnnnnnnnnnnnnnnnnnnnnnnnnnnnnnnnnnnnnnnnnnnnnnnnnnnnnnnnnnnnnnnnnnnnnnnnnnnnnnnnnnnnnnnnnnnnnnnnnnnnnnnnnnnnnnnnnnnnnnnnnnnnnnnnnnnnnnnnnnnnnnnnnnnnnnnnnnnnnnnnnnnnnnnnnnnnnnnnnnnnnnnnnnnnnnnnnnnnnnnnnnnnnnnnnnnnnnnnnnnnnnnnnnnnnnnnnnnnnnnnnnnnnnnnnnnnnnnnnnnnnnnnnnnnnnnnnnnnnnnnnnnnnnnnnnnnnnnnnnnnnnnnnnnnnnnnnnnnnnnnnnnnnnnnnnnnnnnnnnnnnnnnnnnnnnnnnnnnnnnnnnnnnnnnnnnnnnnnnnnnnnnnnnnnnnnnnnnnnnnnnnnnnnnnnnnnnnnnnnnnnnnnnnnnnnnnnnnnnnnnnnnnnnnnnnnnnnnnnnnnnnnnnnnnnnnnnnnnnnnnnnnnnnnnnnnnnnnnnnnnnnnnnnnnnnnnnnnnnnnnnnnnnnnnnnnnnnnnnnnnnnnnnnnnnnnnnnnnnnnnnnnnnnnnnnnnnnnnnnnnnnnnnnnnnnnnnnnnnnnnnnnnnnnnnnnnnnnnnnnnnnnnnnnnnnnnnnnnnnnnnnnnnnnnnnnnnnnnnnnnnnnnnnnnnnnnnnnnnnnnnnnnnnnnnnnnnnnnnnnnnnnnnnnnnnnnnnnnnnnnnnnnnnnnnnnnnnnnnnnnnnnnnnnnnnnnnnnnnnnnnnnnnnnnnnnnnnnnnnnnnnnnnnnnnnnnnnnnnnnnnnnnnnnnnnnnnnnnnnnnnnnnnnnnnnnnnnnnnnnnnnnnnnnnnnnnnnnnnnnnnnnnnnnnnnnnnnnnnnnnnnnnnnnnnnnnnnnnnnnnnnnnnnnnnnnnnnnnnnnnnnnnnnnnnnnnnnnnnnnnnnnnnnnnnnnnnnnnnnnnnnnnnnnnnnnnnnnnnnnnnnnnnnnnnnnnnnnnnnnnnnnnnnnnnnnnnnnnnnnnnnnnnnnnnnnnnnnnnnnnnnnnnnnnnnnnnnnnnnnnnnnnnnnnnnnnnnnnnnnnnnnnnnnnnnnnnnnnnnnnnnnnnnnnnnnnnnnnnnnnnnnnnnnnnnnnnnnnnnnnnnnnnnnnnnnnnnnnnnnnnnnnnnnnnnnnnnnnnnnnnnnnnnnnnnnnnnnnnnnnnnnnnnnnnnnnnnnnnnnnnnnnnnnnnnnnnnnnnnnnnnnnnnnnnnnnnnnnnnnnnnnnnnnnnnnnnnnnnnnnnnnnnnnnnnnnnnnnnnnnnnnnnnnnnnnnnnnnnnnnnnnnnnnnnnnnnnnnnnnnnnnnnnnnnnnnnnnnnnnnnnnnnnnnnnnnnnnnnnnnnnnnnnnnnnnnnnnnnnnnnnnnnnnnnnnnnnnnnnnnnnnnnnnnnnnnnnnnnnnnnnnnnnnnnnnnnnnnnnnnnnnnnnnnnnnnnnnnnnnnnnnnnnnnnnnnnnnnnnnnnnnnnnnnnnnnnnnnnnnnnnnnnnnnnnnnnnnnnnnnnnnnnnnnnnnnnnnnnnnnnnnnnnnnnnnnnnnnnnnnnnnnnnnnnnnnnnnnnnnnnnnnnnnnnnnnnnnnnnnnnnnnnnnnnnnnnnnnnnnnnnnnnnnnnnnnnnnnnnnnnnnnnnnnnnnnnnnnnnnnnnnnnnnnnnnnnnnnnnnnnnnnnnnnnnnnnnnnnnnnnnnnnnnnnnnnnnnnnnnnnnnnnnnnnnnnnnnnnnnnnnnnnnnnnnnnnnnnnnnnnnnnnnnnnnnnnnnnnnnnnnnnnnnnnnnnnnnnnnnnnnnnnnnnnnnnnnnnnnnnnnnnnnnnnnnnnnnnnnnnnnnnnnnnnnnnnnnnnnnnnnnnnnnnnnnnnnnnnnnnnnnnnnnnnnnnnnnnnnnnnnnnnnnnnnnnnnnnnnnnnnnnnnnnnnnnnnnnnnnnnnnnnnnnnnnnnnnnnnnnnnnnnnnnnnnnnnnnnnnnnnnnnnnnnnnnnnnnnnnnnnnnnnnnnnnnnnnnnnnnnnnnnnnnnnnnnnnnnnnnnnnnnnnnnnnnnnnnnnnnnnnnnnnnnnnnnnnnnnnnnnnnnnnnnnnnnnnnnnnnnnnnnnnnnnnnnnnnnnnnnnnnnnnnnnnnnnnnnnnnnnnnnnnnnnnnnnnnnnnnnnnnnnnnnnnnnnnnnnnnnnnnnnnnnnnnnnnnnnnnnnnnnnnnnnnnnnnnnnnnnnnnnnnnnnnnnnnnnnnnnnnnnnnnnnnnnnnnnnnnnnnnnnnnnnnnnnnnnnnnnnnnnnnnnnnnnnnnnnnnnnnnnnnnnnnnnnnnnnnnnnnnnnnnnnnnnnnnnnnnnnnnnnnnnnnnnnnnnnnnnnnnnnnnnnnnnnnnnnnnnnnnnnnnnnnnnnnnnnnnnnnnnnnnnnnnnnnnnnnnnnnnnnnnnnnnnnnnnnnnnnnnnnnnnnnnnnnnnnnnnnnnnnnnnnnnnnnnnnnnnnnnnnnnnnnnnnnnnnnnnnnnnnnnnnnnnnnnnnnnnnnnnnnnnnnnnnnnnnnnnnnnnnnnnnnnnnnnnnnnnnnnnnnnnnnnnnnnnnnnnnnnnnnnnnnnnnnnnnnnnnnnnnnnnnnnnnnnnnnnnnnnnnnnnnnnnnnnnnnnnnnnnnnnnnnnnnnnnnnnnnnnnnnnnnnnnnnnnnnnnnnnnnnnnnnnnnnnnnnnnnnnnnnnnnnnnnnnnnnnnnnnnnnnnnnnnnnnnnnnnnnnnnnnnnnnnnnnnnnnnnnnnnnnnnnnnnnnnnnnnnnnnnnnnnnnnnnnnnnnnnnnnnnnnnnnnnnnnnnnnnnnnnnnnnnnnnnnnnnnnnnnnnnnnnnnnnnnnnnnnnnnnnnnnnnnnnnnnnnnnnnnnnnnnnnnnnnnnnnnnnnnnnnnnnnnnnnnnnnnnnnnnnnnnnnnnnnnnnnnnnnnnnnnnnnnnnnnnnnnnnnnnnnnnnnnnnnnnnnnnnnnnnnnnnnnnnnnnnnnnnnnnnnnnnnnnnnnnnnnnnnnnnnnnnnnnnnnnnnnnnnnnnnnnnnnnnnnnnnnnnnnnnnnnnnnnnnnnnnnnnnnnnnnnnnnnnnnnnnnnnnnnnnnnnnnnnnnnnnnnnnnnnnnnnnnnnnnnnnnnnnnnnnnnnnnnnnnnnnnnnnnnnnnnnnnnnnnnnnnnnnnnnnnnnnnnnnnnnnnnnnnnnnnnnnnnnnnnnnnnnnnnnnnnnnnnnnnnnnnnnnnnnnnnnnnnnnnnnnnnnnnnnnnnnnnnnnnnnnnnnnnnnnnnnnnnnnnnnnnnnnnnnnnnnnnnnnnnnnnnnnnnnnnnnnnnnnnnnnnnnnnnnnnnnnnnnnnnnnnnnnnnnnnnnnnnnnnnnnnnnnnnnnnnnnnnnnnnnnnnnnnnnnnnnnnnnnnnnnnnnnnnnnnnnnnnnnnnnnnnnnnnnnnnnnnnnnnnnnnnnnnnnnnnnnnnnnnnnnnnnnnnnnnnnnnnnnnnnnnnnnnnnnnnnnnnnnnnnnnnnnnnnnnnnnnnnnnnnnnnnnnnnnnnnnnnnnnnnnnnnnnnnnnnnnnnnnnnnnnnnnnnnnnnnnnnnnnnnnnnnnnnnnnnnnnnnnnnnnnnnnnnnnnnnnnnnnnnnnnnnnnnnnnnnnnnnnnnnnnnnnnnnnnnnnnnnnnnnnnnnnnnnnnnnnnnnnnnnnnnnnnnnnnnnnnnnnnnnnnnnnnnnnnnnnnnnnnnnnnnnnnnnnnnnnnnnnnnnnnnnnnnnnnnnnnnnnnnnnnnnnnnnnnnnnnnnnnnnnnnnnnnnnnnnnnnnnnnnnnnnnnnnnnnnnnnnnnnnnnnnnnnnnnnnnnnnnnnnnnnnnnnnnnnnnnnnnnnnnnnnnnnnnnnnnnnnnnnnnnnnnnnnnnnnnnnnnnnnnnnnnnnnnnnnnnnnnnnnnnnnnnnnnnnnnnnnnnnnnnnnnnnnnnnnnnnnnnnnnnnnnnnnnnnnnnnnnnnnnnnnnnnnnnnnnnnnnnnnnnnnnnnnnnnnnnnnnnnnnnnnnnnnnnnnnnnnnnnnnnnnnnnnnnnnnnnnnnnnnnnnnnnnnnnnnnnnnnnnnnnnnnnnnnnnnnnnnnnnnnnnnnnnnnnnnnnnnnnnnnnnnnnnnnnnnnnnnnnnnnnnnnnnnnnnnnnnnnnnnnnnnnnnnnnnnnnnnnnnnnnnnnnnnnnnnnnnnnnnnnnnnnnnnnnnnnnnnnnnnnnnnnnnnnnnnnnnnnnnnnnnnnnnnnnnnnnnnnnnnnnnnnnnnnnnnnnnnnnnnnnnnnnnnnnnnnnnnnnnnnnnnnnnnnnnnnnnnnnnnnnnnnnnnnnnnnnnnnnnnnnnnnnnnnnnnnnnnnnnnnnnnnnnnnnnnnnnnnnnnnnnnnnnnnnnnnnnnnnnnnnnnnnnnnnnnnnnnnnnnnnnnnnnnnnnnnnnnnnnnnnnnnnnnnnnnnnnnnnnnnnnnnnnnnnnnnnnnnnnnnnnnnnnnnnnnnnnnnnnnnnnnnnnnnnnnnnnnnnnnnnnnnnnnnnnnnnnnnnnnnnnnnnnnnnnnnnnnnnnnnnnnnnnnnnnnnnnnnnnnnnnnnnnnnnnnnnnnnnnnnnnnnnnnnnnnnnnnnnnnnnnnnnnnnnnnnnnnnnnnnnnnnnnnnnnnnnnnnnnnnnnnnnnnnnnnnnnnnnnnnnnnnnnnnnnnnnnnnnnnnnnnnnnnnnnnnnnnnnnnnnnnnnnnnnnnnnnnnnnnnnnnnnnnnnnnnnnnnnnnnnnnnnnnnnnnnnnnnnnnnnnnnnnnnnnnnnnnnnnnnnnnnnnnnnnnnnnnnnnnnnnnnnnnnnnnnnnnnnnnnnnnnnnnnnnnnnnnnnnnnnnnnnnnnnnnnnnnnnnnnnnnnnnnnnnnnnnnnnnnnnnnnnnnnnnnnnnnnnnnnnnnnnnnnnnnnnnnnnnnnnnnnnnnnnnnnnnnnnnnnnnnnnnnnnnnnnnnnnnnnnnnnnnnnnnnnnnnnnnnnnnnnnnnnnnnnnnnnnnnnnnnnnnnnnnnnnnnnnnnnnnnnnnnnnnnnnnnnnnnnnnnnnnnnnnnnnnnnnnnnnnnnnnnnnnnnnnnnnnnnnnnnnnnnnnnnnnnnnnnnnnnnnnnnnnnnnnnnnnnnnnnnnnnnnnnnnnnnnnnnnnnnnnnnnnnnnnnnnnnnnnnnnnnnnnnnnnnnnnnnnnnnnnnnnnnnnnnnnnnnnnnnnnnnnnnnnnnnnnnnnnnnnnnnnnnnnnnnnnnnnnnnnnnnnnnnnnnnnnnnnnnnnnnnnnnnnnnnnnnnnnnnnnnnnnnnnnnnnnnnnnnnnnnnnnnnnnnnnnnnnnnnnnnnnnnnnnnnnnnnnnnnnnnnnnnnnnnnnnnnnnnnnnnnnnnnnnnnnnnnnnnnnnnnnnnnnnnnnnnnnnnnnnnnnnnnnnnnnnnnnnnnnnnnnnnnnnnnnnnnnnnnnnnnnnnnnnnnnnnnnnnnnnnnnnnnnnnnnnnnnnnnnnnnnnnnnnnnnnnnnnnnnnnnnnnnnnnnnnnnnnnnnnnnnnnnnnnnnnnnnnnnnnnnnnnnnnnnnnnnnnnnnnnnnnnnnnnnnnnnnnnnnnnnnnnnnnnnnnnnnnnnnnnnnnnnnnnnnnnnnnnnnnnnnnnnnnnnnnnnnnnnnnnnnnnnnnnnnnnnnnnnnnnnnnnnnnnnnnnnnnnnnnnnnnnnnnnnnnnnnnnnnnnnnnnnnnnnnnnnnnnnnnnnnnnnnnnnnnnnnnnnnnnnnnnnnnnnnnnnnnnnnnnnnnnnnnnnnnnnnnnnnnnnnnnnnnnnnnnnnnnnnnnnnnnnnnnnnnnnnnnnnnnnnnnnnnnnnnnnnnnnnnnnnnnnnnnnnnnnnnnnnnnnnnnnnnnnnnnnnnnnnnnnnnnnnnnnnnnnnnnnnnnnnnnnnnnnnnnnnnnnnnnnnnnnnnnnnnnnnnnnnnnnnnnnnnnnnnnnnnnnnnnnnnnnnnnnnnnnnnnnnnnnnnnnnnnnnnnnnnnnnnnnnnnnnnnnnnnnnnnnnnnnnnnnnnnnnnnnnnnnnnnnnnnnnnnnnnnnnnnnnnnnnnnnnnnnnnnnnnnnnnnnnnnnnnnnnnnnnnnnnnnnnnnnnnnnnnnnnnnnnnnnnnnnnnnnnnnnnnnnnnnnnnnnnnnnnnnnnnnnnnnnnnnnnnnnnnnnnnnnnnnnnnnnnnnnnnnnnnnnnnnnnnnnnnnnnnnnnnnnnnnnnnnnnnnnnnnnnnnnnnnnnnnnnnnnnnnnnnnnnnnnnnnnnnnnnnnnnnnnnnnnnnnnnnnnnnnnnnnnnnnnnnnnnnnnnnnnnnnnnnnnnnnnnnnnnnnnnnnnnnnnnnnnnnnnnnnnnnnnnnnnnnnnnnnnnnnnnnnnnnnnnnnnnnnnnnnnnnnnnnnnnnnnnnnnnnnnnnnnnnnnnnnnnnnnnnnnnnnnnnnnnnnnnnnnnnnnnnnnnnnnnnnnnnnnnnnnnnnnnnnnnnnnnnnnnnnnnnnnnnnnnnnnnnnnnnnnnnnnnnnnnnnnnnnnnnnnnnnnnnnnnnnnnnnnnnnnnnnnnnnnnnnnnnnnnnnnnnnnnnnnnnnnnnnnnnnnnnnnnnnnnnnnnnnnnnnnnnnnnnnnnnnnnnnnnnnnnnnnnnnnnnnnnnnnnnnnnnnnnnnnnnnnnnnnnnnnnnnnnnnnnnnnnnnnnnnnnnnnnnnnnnnnnnnnnnnnnnnnnnnnnnnnnnnnnnnnnnnnnnnnnnnnnnnnnnnnnnnnnnnnnnnnnnnnnnnnnnnnnnnnnnnnnnnnnnnnnnnnnnnnnnnnnnnnnnnnnnnnnnnnnnnnnnnnnnnnnnnnnnnnnnnnnnnnnnnnnnnnnnnnnnnnnnnnnnnnnnnnnnnnnnnnnnnnnnnnnnnnnnnnnnnnnnnnnnnnnnnnnnnnnnnnnnnnnnnnnnnnnnnnnnnnnnnnnnnnnnnnnnnnnnnnnnnnnnnnnnnnnnnnnnnnnnnnnnnnnnnnnnnnnnnnnnnnnnnnnnnnnnnnnnnnnnnnnnnnnnnnnnnnnnnnnnnnnnnnnnnnnnnnnnnnnnnnnnnnnnnnnnnnnnnnnnnnnnnnnnnnnnnnnnnnnnnnnnnnnnnnnnnnnnnnnnnnnnnnnnnnnnnnnnnnnnnnnnnnnnnnnnnnnnnnnnnnnnnnnnnnnnnnnnnnnnnnnnnnnnnnnnnnnnnnnnnnnnnnnnnnnnnnnnnnnnnnnnnnnnnnnnnnnnnnnnnnnnnnnnnnnnnnnnnnnnnnnnnnnnnnnnnnnnnnnnnnnnnnnnnnnnnnnnnnnnnnnnnnnnnnnnnnnnnnnnnnnnnnnnnnnnnnnnnnnnnnnnnnnnnnnnnnnnnnnnnnnnnnnnnnnnnnnnnnnnnnnnnnnnnnnnnnnnnnnnnnnnnnnnnnnnnnnnnnnnnnnnnnnnnnnnnnnnnnnnnnnnnnnnnnnnnnnnnnnnnnnnnnnnnnnnnnnnnnnnnnnnnnnnnnnnnnnnnnnnnnnnnnnnnnnnnnnnnnnnnnnnnnnnnnnnnnnnnnnnnnnnnnnnnnnnnnnnnnnnnnnnnnnnnnnnnnnnnnnnnnnnnnnnnnnnnnnnnnnnnnnnnnnnnnnnnnnnnnnnnnnnnnnnnnnnnnnnnnnnnnnnnnnnnnnnnnnnnnnnnnnnnnnnnnnnnnnnnnnnnnnnnnnnnnnnnnnnnnnnnnnnnnnnnnnnnnnnnnnnnnnnnnnnnnnnnnnnnnnnnnnnnnnnnnnnnnnnnnnnnnnnnnnnnnnnnnnnnnnnnnnnnnnnnnnnnnnnnnnnnnnnnnnnnnnnnnnnnnnnnnnnnnnnnnnnnnnnnnnnnnnnnnnnnnnnnnnnnnnnnnnnnnnnnnnnnnnnnnnnnnnnnnnnnnnnnnnnnnnnnnnnnnnnnnnnnnnnnnnnnnnnnnnnnnnnnnnnnnnnnnnnnnnnnnnnnnnnnnnnnnnnnnnnnnnnnnnnnnnnnnnnnnnnnnnnnnnnnnnnnnnnnnnnnnnnnnnnnnnnnnnnnnnnnnnnnnnnnnnnnnnnnnnnnnnnnnnnnnnnnnnnnnnnnnnnnnnnnnnnnnnnnnnnnnnnnnnnnnnnnnnnnnnnnnnnnnnnnnnnnnnnnnnnnnnnnnnnnnnnnnnnnnnnnnnnnnnnnnnnnnnnnnnnnnnnnnnnnnnnnnnnnnnnnnnnnnnnnnnnnnnnnnnnnnnnnnnnnnnnnnnnnnnnnnnnnnnnnnnnnnnnnnnnnnnnnnnnnnnnnnnnnnnnnnnnnnnnnnnnnnnnnnnnnnnnnnnnnnnnnnnnnnnnnnnnnnnnnnnnnnnnnnnnnnnnnnnnnnnnnnnnnnnnnnnnnnnnnnnnnnnnnnnnnnnnnnnnnnnnnnnnnnnnnnnnnnnnnnnnnnnnnnnnnnnnnnnnnnnnnnnnnnnnnnnnnnnnnnnnnnnnnnnnnnnnnnnnnnnnnnnnnnnnnnnnnnnnnnnnnnnnnnnnnnnnnnnnnnnnnnnnnnnnnnnnnnnnnnnnnnnnnnnnnnnnnnnnnnnnnnnnnnnnnnnnnnnnnnnnnnnnnnnnnnnnnnnnnnnnnnnnnnnnnnnnnnnnnnnnnnnnnnnnnnnnnnnnnnnnnnnnnnnnnnnnnnnnnnnnnnnnnnnnnnnnnnnnnnnnnnnnnnnnnnnnnnnnnnnnnnnnnnnnnnnnnnnnnnnnnnnnnnnnnnnnnnnnnnnnnnnnnnnnnnnnnnnnnnnnnnnnnnnnnnnnnnnnnnnnnnnnnnnnnnnnnnnnnnnnnnnnnnnnnnnnnnnnnnnnnnnnnnnnnnnnnnnnnnnnnnnnnnnnnnnnnnnnnnnnnnnnnnnnnnnnnnnnnnnnnnnnnnnnnnnnnnnnnnnnnnnnnnnnnnnnnnnnnnnnnnnnnnnnnnnnnnnnnnnnnnnnnnnnnnnnnnnnnnnnnnnnnnnnnnnnnnnnnnnnnnnnnnnnnnnnnnnnnnnnnnnnnnnnnnnnnnnnnnnnnnnnnnnnnnnnnnnnnnnnnnnnnnnnnnnnnnnnnnnnnnnnnnnnnnnnnnnnnnnnnnnnnnnnnnnnnnnnnnnnnnnnnnnnnnnnnnnnnnnnnnnnnnnnnnnnnnnnnnnnnnnnnnnnnnnnnnnnnnnnnnnnnnnnnnnnnnnnnnnnnnnnntgtggatacaggattgtgggtacaagatgggcatcgacgtggcgttctctgattggataaggtaactgtgtatccagtagagaatccagtagggtgtatccagtaagaggtatccagtagcaggcttagaggtagcacgcggttgcgaactaaggacctgaatcgaatcactttgcattttgccaactactgctcaagtgctcttccttttggttatgagcccaagccccgtcttccctgaccaagaccccgactacgccttcgccatggacgctgccccgaccgcgaccgcccgcatcaacaagttcgacggaaccaacttccacacatggaagttcaagatgcagatggtgctggaggagcgcgaactgtgggaagtgacgagtggggaagtgaagctcgagcagtgcacgaccgcggcggaccaagcgacgtttcgcaagaagtcgcgcaaggcgctggcgatcgtctgtctcgcgttggaggactcgcagctgccgctggtgcggtcggcgaaggacgcgcatgatgcatggtcaagactcgagggacacttcgagaagaagagcctggcgaacaagctttttcttcgtcgacggttcttcacgacaacgatggacgaaggtgatgatgtgctggagcacattaacaagctcaagacgctggcggaacagctcgacgcggtcggcgctccggtcagcgaggacgacttggtgatcacgcttcttgccagtctgagcgagtcgtaccagttcctcatcacggcgttggaatcgcgttccgacacgctgacgtgggagctcgtgacgtctcggctcctgcacgaggacatgaagcgcaaggaacaaggtggcggtgctgacggaaccgcgcacgctcaaggtcaagcgttcatgacaagcgacaacgggaagcgcaagggacggcaggcgcaagcgcagaggacgagcgcctgtcactactgcggcgagcacggacattggatcgccaagtgtccggtgcggatccgcgagaacggggagcggcagaggccgcaacgagcgaacgtcgcgcaggtcgaagatgactctggcgacttcctcttctcggttggtggcgacacgggtgcctccaagctgagcggcatgtggctggtcgactcgggtgcgacgcagcacatgacgtactcgaaggagtacatgaagaactacaagaagatctctccggtggacgtgcatctggcggacgacggcgtggttcaggcggtggggagcggcgacatcgtgatgtcgatgcagacaccgcgcggcatgaagaagggtgtgctcacgggtgtgtggcacatcccgaagctgtcgcgcaacctgttctccgtcggccgcttcaccaaggacgtcgggccagtgaccttcgagagcgacgggtgcttcgcggaaacgaagggtctcaagtggaagctcggcgctcgcgaaggcaaaggactgttcaagctctgcatgacgccgaggacgcctgctgacgaggccaatgcggcaagctcgaagaatcgccaaggggacaccacgtcgtacctctggcaccttcgacttggtcacatcggccatggtggtctcgacgccatcgtcaagaagggctacggcactggcatcccaatgacgtcggtgaagcagtgggaggtgtgcgacgggtgcgcactcggcaagcaaacgcgagtaagcttcatgaagtcgtcgccgaaccgtgcgaagcaagtgctggaggtggtccacagcgatgtgtgcggtccgatgcagacggcgacgttcggaggcaagcgctacttcgtcacgttcatcgacgacaagtcgcacttctgcgtggtgtacctgctacggaacaagtcggaggtggctgccaagttcgctgcgttcgtcgcgttggctgagacgcagaccggcaagcgagtgaaggtgcttcggagcgacaacggcggcgagtacacttcgggtgcgatggccaagttgtgtgcggatcgcggcatcgagcagaagttcacgccaccatacacgcctcagctcaacggagtggccgagcgaatgaatcggacgctggtggagtgtgcgcgctgcatgctggagcacgccgggttgtcgaaggagtactggggagaagcagtgatgacggccacgttcctccgcaaccggtgtccgacgcgcgccatcagtcacgacaagtcgccgcaccacgtttggaccggcaagaagcctttgctggccaacctcaaggtgttcgggtgccacgcgtacgtgcacgtgccgaaggagaagcggtcgaagttcgacgctcggtcggtgcgctgtcgtttcctcgggtactcggagcacgagaaggcgtatcggttcgaggagatcgagagcggtcgcgtgttggtgagccgcgacgcgcagttcatggagggtgtcttcgacggtgggagacgcgactacgcttcgaaggaggtgttggtgggtcttccgacagatgatgatgaagacaccacggatgaagagactcagtccggatcagacgagaacagagaagaagctgcgcggaatcaagactttgaacccggcagcaagcgacacccgcgcacgcagtcgctcgaggaagccgtggaggttccgagtgccaagcggtatgcggtgccgagacgacagcagccgctggacgagatgtctgccgcagcacaagagaaggaagacttcgaggctgcgtacgtcgtggattcagtgggagagatgccgacaacgttcaagtcggcgatggaatccagcgacgcagacaagtggaaagaggcgtgcgactcggaggtggagtcgctccgcaagaacgagacgtggaccctggtgccactgccgaagggacgcaaggcgatcggctgcagatgggtgttccgcgtgaaggagaaccagtctggagagatcgagcggttcaaggcgcgactggtggcgaaggggttctcgcagaagtacggcatcgactacgacgagacgttcgcgccggtggccaagttcacgtcgattcgggtgttgctgagtctggcggccaagtacaagctcacagtgcaccagatggatgtgaagaccgcgttcctcaacggcttgttggacgaggacatctacatggcgcagccggacggatatgtggacggagatcgacccgactacgtgtgccggctcaagcgttcgctgtacggcctgaagcagtcgccgcggatgtggaacaagacgatcgacgagttcatgttgaagctggggttcaagaagtgcgagtccgaccactgcatctacttgaagcgggacaatcacgacatgatgttcgtggcactgtacgtggacgatctggtcctcgccagcagcagcgacgggatgctgaaggacacgaagcaggcgctgagtgaccggttcgagatgaccgacatgggccagctcaagtacttcctcggtatggagatcgagcaagatgtggcgactgggaaggtgtcggtgcggcagaccaagttcgcgaaggacattctcgagaagttcaagatggatgagagcaaccctgtgaagacaccgcaggatccgggtctgaagctgaccaaggccatgtgcgagggaggctgcaagcacgacgagaccatggcgaatgttccgtaccggaacgccgtgggctgcctcatgtatctcatggtggggactcgtccggacctcgcagcggcagtgnnnnnnnnnnnnnnnnnnnnnnnnnnnnnnnnnnnnnnnnnnnnnnnnnnnnnnnnnnnnnnnnnnnnnnnnnnnnnnnnnnnnnnnnnnnnnnnnnnnnggggcgtcgtcacatcagtcttgacaacactcccactcgactcgtcagcgaccacgatgcccagcttcgtcctgagcgcgtcgaactgcggcgccgcgatcggcttcgtcatgatgtccgccagcatgtcgagtgtcgaaacatactgcaacaccacttgaccgtcttccaccttctcgcgcacgaagtggtagcgaatgtcgatgtgcttggtgcgcttgtggaactccgggttcttggccaacgcgatggagccttggttgtcctcgtagatcttcaccccttcatcgctcgccatctcgcccagctcgcacagaaacaccttgagccacaccgcctcctgcgtggcctccgacagcgccatgtactcggcttccgtcgacgagagcgccaccgtgcgctgcttcttgcttcgccagctgatgcatccgccgttcatcatgaacgcgtagccactcgtactccgtcgagactcgatgtcgccggcccagtccgcgtccgagtagccttgcagtccgtcctcgctgctcgcttgaaacacgaggccgtgcgtcttcgtgcctcggatgtagcggaagaccctcttgagcgcctgccagtgtgtcggacatgggtccgctgcgaactggctcagcactcccactgccgctgcgaggtccggacgagtccccaccatgagatacatgaggcagcccacggcgttccggtacggaacattcgccatggtctcgtcgtgcttgcagcctccctcgcacatggccttggtcagcttcagacccggatcctgcggtgtcttcacagggttgctctcatccatcttgaacttctcgagaatgtccttcgcgaacttggtctgccgcaccgacaccttcccagtcgccacatcttgctcgatctccataccgagaaagtacttgagctggcccatgtcagtcatctcgaaccggtcactcagcgcctgcttcgtgtccttcagcatcctgtcgctgctgctggcgaggaccagatcgtccacgtacagtgccacgaacatcatgtcgtgattgtcccgcttcaagtagatgcagtggtcggactcgcacttcttgaaccccagcttcaacatgaactcgtcgatcgtcttgttccacatccgcggcgactgcttcaggccgtacagcgaacgcttgagccggcacacgtagtcgggtcgatctccgtccacatatccgtccggctgcgccatgtagatgtcctcgtccaacaagccgttgaggaacgcggtcttcacatccatctggtgcactgtgagcttgtacttggccgccagactcagcaacacccgaatcgacgtgaacttggccaccggcgcgaacgtctcgtcgtagtcgatgccgtacttctgcgagaaccccttcgccaccagtcgcgccttgaaccgctcgatctctccagactggttctccttcacgcggaacacccatctgcagccgatcgccttgcgtcccttcggcagtggcaccagggtccacgtctcgttcttgcggagcgactccacctccgagtcgcacgcctctttccacttgtctgcgtcgctggattccatcgccgacttgaacgttgtcggcatctctcccactgaatccacgacgtacgcagcctcgaagtcttccttctcttgtgctgcggcagacatctcgtccagcggctgctgtcgtctcggcaccgcataccgcttggcactcggaacctccacggcttcctcgagcgactgcgtgcgcgggtgtcgcttgctgccgggttcaaagtcttgattccgcgcagcttcttctctgttctcgtctgatccggactgagtctcttcatccgtggtgtcttcatcatcatctgtcggaagacccaccaacacctccttcgaagcgtagtcgcgtctcccaccgtcgaagacatcctccatgaactgcgcgtcgcggctcaccaacacgcgaccgctctcgatctcctcgaaccgatacgccttctcgtgctccgagtacccgaggaaacgacagcgcaccgaccgagcgtcgaacttcgaccgcttctccttcggcacgtgcacgtacgcgtggcacccgaacaccttgaggttggccagcaaaggcttcttgccggtccaaacgtggtgcggcgacttgtcgtgactgatggcgcgcgtcggacaccggttgcggaggaacgtggccgtcatcaccgcttctccccagtactccttcgacaacccggcgtgctccagcatgcagcgcgcacactccaccagcgtccgattcattcgctcggccactccgttgagctgaggcgtgtatggtggcgtgaacttctgctcgatgccgcgatccgcacacaacttggccatcgcacccgaagtgtactcgccgccgttgtcgctccgaagcaccttcactcgcttgccggtctgcgtctcagccaacgcgacgaacgcagcgaacttggcagccacctccgacttgttccgtagcaggtacaccacgcagaagtgcgacttgtcgtcgatgaacgtgacgaagtagcgcttgcctccgaacgtcgccgtctgcatcggaccgcacacatcgctgtggaccacctccagcacttgcttcgcacggttcggcgacgacttcatgaagcttactcgcgtttgcttgccgagtgcgcacccgtcgcacacctcccactgcttcaccgacgtcattgggatgccagtgccgtagcccttcttgacgatggcgtcgagaccaccatggccgatgtgaccaagtcgaaggtgccagaggcacgacgtggtgtccccttggcgattcttcgagcttgccgcattggcctcgtcagcaggcgtcctcggcgtcatgcagagcttgaacagtcctttgccttcgcgagcgccaagcttccacttgagacccttcgtttccgcgaagcacccgtcgctctcgaaggtcactggcccgacgtccttggtgaagcggccgacggagaacaggttgcgcgacagcttcgggatgtgccacacacccgtgagcacacccttcttcatgccgcgcggtgtctgcatcgacatcacgatgtcgccgctccccaccgccgtgaaccacgccgtcgtccgccagatgcacgtccaccggagagatcttcttgtagttcttcatgtactccttcgagtacgtcatgtgctgcgtcgcacccgagtcgaccagccacatgccgctcagcttggaggcacccgtgtcgccaccaaccgagaagaggaagtcgccagagtcatcttcgacctgcgcgacgttcgctcgttgcggcctctgccgctccccgttctcgcggatccgcaccggacacttggcgatccaatgtccgtgctcgccgcagtagtgacaggcgctcgtcctctgcgcttgcgcctgccgtcctttgcgcttcccgttgtcgcttgtcatgaacgcttgaccttgagcgtgcgcggttccgtcagcaccgccaccttgttccttgcgcttcatgtcctcgtgcaggagccgagacgtcacgagctcccacgtcagcgtgtcggagcgcgattccaacgccgtgatgaggaactggtacgactcgctcagactggcaagaagcgtgatcaccaagtcgtcctcgctgaccggagcgccgaccgcgtcgagctgttccgccagcgtcttgagcttgttaatgtgctccagcacatcatcaccttcgtccatcgttgtcgtgaagaaccgtcgacgaagaaagagcttgttcgccaggctcttcttctcgaagtgtccctcgagtcttgaccatgcatcatgcgcgtccttcgccgaccgcaccagcggcagctgcgagtcctccaacgcgagacagacgatcgccagcgccttgcgcgacttcttgcgaaacgtcgcttggtccgccgcggtcgtgcactgctcgaacttcacttccccactcgtcacttcccacagttcgcgctcctccagcaccatctgcatcttgaacttccatgtgtggaagttagttccgtcgaacttgttgatgcgggcggtcgcggtcggggcggcgtccatggcgaaggcgtagtcggggtcttggtcagggaagacggggcttgggctcataaccaaaaggaagaacacttgagcagtagttggcaaaatgcaaagtgattcgattcaggtccttagttcgcaaccgcgtgctacctctaagcctgctactggatacctcttactggatacaccctactggattctctactggatacacagttaccttatccaatcagagaacgccacgtcgatgcccatcttgtacccacaatcttggcgtaatcaccgtgacgtagtcatcgtcccgtaatcacctgaatgattgcggtacaacacagtgaaggtcacgccgacctcactgatgacgcgttcgcgtcacacggtcgcttggcgaggcgtcgtcacatcagtcttgacaacagaaacgccctaagatccaacagacgtggctctcactataaggtggtcgagaggttatcaacgtctgttagatctcagtggttgagcggttctaaaactaccttcgtatcgaaaagacgtggctctcgctctcaagtggtcgagaggggtcgtcgttgaaatcgctgctgtcccgaaagaaggtttcaggaatgttctcggtggtaaattacggtaaggaaaaaatctgccggcgtaatgttccatgacccactactcttggcatcaccgctccgctccgcttagtccaacttgccaacaccgaagttgccggtggtctgctgccactccttctccaagtcgctcgtttggccagccagccttctggactgagactcctcctgcttgtagccgctcgtctgtgcagtctgctgctgctcctgttgctgctcctgctgctgctcttgctgctgctccgagtcgttgttcttcgacgactgttgctgctgttgctgctgttgctcctgctgctgcgatccattagccttagaagactgctgctgctgctgctgagagccacccgccttcgaggactgctgctgctgctgcgaaccgcccgagccagtggaacctggcgtgtactcaatgaacgtcgagaccgacttgaccgtcttcagcgcagtctcgccgttgcgcgactcgaaggcgccgctgtccaccagctcattggccacgcacgcacgacccaggaggctcttgcactggtcttggctgctcgccgcgtacagcgcgccgtccttacccgtgaaaagaggcatcatcgtgttgctgaagtagttgccctccgcgagcacccaggcgttggcgccgatctcgaacgagtggcccgtgttgttgccccagaagttgttggcgacgtgcgcgacgacctttgcagcgctgtcgccaccaatcttgggcgagcggcccgacgtgccgtggatgtagttgttgagcatgctgaacttggtcacgccgtagaagatgaacgaccagtagtggtggccgtcgcacgacgccgagtagtcggtgttgccgtcgaagtccgagttactgatggtcagggagtcggtgctcgccatgttggtcgtgaggaactgtcggccgacgtgcgagaccttgatgtggtcgagccaaatgttcttcatggcggttttgccgtggtccagaccctggaggtagatggcgtcgccaccccagacgaggtgtcggttgagctccgtgatgtggacgttctggataatgatgttgttgccgttgagcgtgagacccttgcccttgatgacgccgctcttgccgatgccacggatggtcttgttgccggtaacagtcatgcgcttgagagctgcgttgtcgtatgtgatcttcaccttggtgccaccagtgcagccgcccgtggtcgccatgttgccgccctggatgatcacatcctggctcttgtagccgttgttcttggccatgcactcgcgagtgtagtccggacggcaacccgtctccgtggtggtgccctccgtgcctcggaagtcgaacgtcttgttcagcacgaccacaagcggctcgctggacgcgaggtacgagacgagctcgctggtcgacttcgggtacacggtcttgcctcccgctccaccggtggcgccggcggcgagtccctcgggcgagccgacagagaaggcgttggcgttcttagcgacgagggccaagacggcggcgatagcgaattggaggcgcatggtgaagtaagtgtcttgagtttcgccggcgagttgtagtgttcaaggtgaggcaaattgaagagtgaatttgtttttatcctggttgtacagattcagtagctcaagaccgggcgagacccaggttgacacatgagcagccttaggtgtcagcccagacaactgggctcgttgtcgaacgggctaccttgaccggtttcagtcatttggtatctttttggtgtctgttggtgttgtccacctggttgacaggtcaatgcaagttttcccgtgtttctttcgaagaggctggcaatttgttcgcgacagacttgtgggtcagaggcgttttgactcagcgtcgtggatagtcttgtgttgtgccgcacaacttgtgcgcggtcgcttgaaaacgccaccggcttcgcgacaggagagtttggcggctggtggattacagtccgtatccacgtcatttcgcacgaacgtgctgtgcatgtatgtacagtaccagcattggatgcatgttggcagggaacaccgtatctagtcgagggaaactcaatttgtcgttgtagtcgaccgagcttcgccattttcgctttctatcggaccatgatgctataatactacaaggtttggctctcacaatgcacctccctccttccctgcagcacccaagcaagcaagctatctatctagatacctgtgacgaacttcaggctggaggggtctggtttctcttctcggacggtcgaacagaaggtatcgactgggacaagatgtctcttgtgagtcagacggaaaccgaggagagatcagctgatcgtggagtatccacaaccacaagcgagcgctggctgtaccgagcgggcgggcgcctcgagctcgcagattctgacgctgtcgatagcaggctctcgtgcaagactttaacagcacgacgaacaagcaagcaaacaaacaactacagtatgacctgcttgtcgtgctgtgggtactgtagtactgtatttgtgagggcagctgcctcgcaaatcgtttccttcgatctgcaccagccgtatttcgcgacttggcttcaacaactttcgcgacgtcccgaacggctctctcataattattattagattaacgattaccgcatctggttttcgctgtttgaatgttcaatcgacgcttcattgcacggcgcgtgtcgtcgtccaaaacgggggtcactggatatacgaccggtgcatccagcgttgttgacgtgagctgcgccgtcaattgtttggataggcatctttcacggacctgcagttgtgctaaaggaatcaccccaaacgtttttgatcccagcacgatggccataattacggcaccgaacattatctactgtacagtagtgtttccgcgacgatacgagcggctacaatgaaccgatgggtatgccagagcttgatgtgtcctattaagaaccccctagcttgtgggatcgttagctgcgataatctgaaacattagtgttgcgactgtaggagccaacacttggctcgaagtcacccggcaccttttcaccgtcgatcccgaatgcccggacaagtagtgctcacactaatcgtgcctgcgcaacctgtcataccatccacagtaccgtaacggtgggtctagcgctttatcgctcgcgaactatgctagatatctactgcaatctccatggtcgaatttcctgttcacgacgctggagcttgcatctttcctgagacgtgcaccagccgcttcgaaagacctgccttcaatcaattgactaaacttgcgcgactaaatcactcctggtttcatgtcctcgtatgacagctgttctcactgatctcacgtgtagccatgcatcaaatcggacggcaacatacaccgggctaaaacggtgtccacgtcgacggggcggataaatgctattaataaaggtcgtcccggtgttcgaaatggattgctgtgtcactattataagttgcgaagataaaacgaaaactctcgtgatgtatgtatgaactcgccaacaggttcgcgaagaattttcccgctaccaattttcgtgaaggtgaaaactgtggtgacgccatcctgaagattataagctaatctgcattttaatactagtaccggtactttgatcgacaaaccatcgactacattattgttattacgctacaaaatctagagaacttttagcgaggaagctctaattacagaatggcctctgttttcatcaactttcttagtccagcttgccgacgccgaagttgtcagtcgtctgggcgtacacgctttccacgtcactcgcctggatcgacgactgagtcgtctccgtcgacggcttcacggttccagcatcggactgctgcacttgctgctggtccccctcctgctgttgctgctgctgctccgagtcgctggccttggcgtccgaagtgtactcaacgaacgtagggaccgacttgatggtctgaagcgccgtctcgccgttgcgagacgagaagttgccgctattcacgagctcgttggccacgcacgcacggcccagcagactctggcactcatcttcgctgccagcgacatacagtgcaccctcgtcgcccttgttgtacagaggcattctcgtgttggtaaagtagttgccctcagccagaacccaggcgttcgagccaatctcaaatgagtggcccgagttgttgccccagcagttgttggcgacgtgtgcgacgaccttagcagcgctgtcaccgccgatcttgggcgagcggcccgacgtgccgtggatgtagttgttgagcatgctgaacttggtcacgccgtagaagatgaacgaccagtagtggtggccgtcgcacgacgccgagtagtcggtgttgccgtcgaagtccgagttactgatggtcatggagtcggtactggccttgtaagtcgtgatgaactggcggccgacacgcgagatcttgatgtggtcgagccaaatgttcttcatgggcgtggtgttgttgtcggtgccctggatgtagatggcgtcgccgccccagaccaagtggtggttgagctccgtgatgtggatgttctggataataatgttgtggcccttgagggtcatgcccttgcccttgatgacgccgctcttgccgataccgcggatggtcttgtcccccttcacagtcatgcgcttgatggcggccttgtcgtaggtgacggtcgtctccgtaccgttgtcgcagccacccgtggtcgccatgttgccgttctggatgatcacatcctggctcttgaagccgttgttctttgcgatacactcgcgtgtgtactggggacggcaaccggtctcagttactgtgccctccgtgccgcggaagtcgaacgtcttgttcaggacgaccacgagcggctccgtcgcattcaagtacgcgatcaactcggtggtgttggtcgggtacaccgtcttgccggtcgctccgccagtagcgccagcagcaagaccgggggccgtgccaatggtgaaggcgctggcactcttggtgacgagggccaaggcggcgacgagagcgagttggatgcgtcccatgctgaagaagcgaaggtgtcttgagtacgacgacgaaggggagacagtgctcaagacccagtaaattggaaactgaacttgatggacgacggttgcacgagtaccagggggtcgaggcgttgcttcgccagggttgttgtatctagttcgcaaaccttgaaacccttgagtcaagagctgtgtctaccctggaacatgtggatgggcaactttctgcttatggtattgaaactgtatcttgaagagcttttgcaccagcgtatggttgtgtcaaatcgcagccactatgtagcggctgatgaggaggaggacatggtgttctgacgatcgcgtcgcgggagatcttacaatcacagttacacctatggactcgctcagcttggagctttaccgtatgctagccaagaaggcaaggcgtttgtggatcctttcgcttcatgtacccgaaaacccacgacgtttagggaatgctggagttaatctttaaacatgtccaagtccgcggctggtaggtcacaattctgcagtactgtactggtaatacgcagtaggatgcattgtctcacacgcgtagtatcatggaattccccgataaaacaaccagcgcgctccttgatacggtcagagtacaaacttgctaggtagtactaaaacctgcttcacctctggtgctgcgctaaccagtacccagcgagtctgaatacatgggtcacgcagtttgctcattactagtctctcatatctaatatcaactgggcgatccgatcgttcgctggtgacagcttttgcagctgttttcgttgatcactttaatctgtggctgtcaatccacgattgtgaaagtcacgcgcatggattgccgcgcatgacttacgcgatctcaagccatgtggtggcaaaggatggcacatcgcacaccggcgaatcgtgaaataaccgtgcattaacggatctcaaattcgcaccaattggaatcaccacaactgaactttacatcggggcgtttaacgcaacgttcaattcgcttcaaccatctaaagcggcgcgatcgttggtacatgtaactaacgaatacgtctgcctcaacttccaacgcacagaggtaactttctccttctgccttgtgcaatttaaaatgaaagtaggatttagcattatgtcgaagcgtggacgtatacaatgtgcttgaaatacccaacacgggcattgcacatagagacaacgtcacagttaatcgagaagggatatcttattttctaccaacgggccagcagaccgcgcgtataaccataacctggcaagttatctagacgcttctcgttggcctccattttaaatgagatcgttccgccgtgtatatcccatctagtatcgatgttagcgagatacctacttcacagaataaatgcttaacaacaacactgcttgcagtttgaagtgctcctcggatgattttggattaaattttacgttttagccgatcaaaatgcagtattgtggaaaatcttaaacaaaaactgcagttttagaaaataaatcggggcgttttaacgtgaagataagtgcagttctaaaatctcaaaaagcacttgtttagtaaagtacggtatgagtcaacagccgcaatgttgtccaccaccagcgagcctttccggcaaccactgtatcaataccagcttactgatgggagaattagagcttgcggtatgtaaaacagtacggttatgctaacacaagcattttattgtaaaccactccaattttgaagtttccaatgatgctatgagtcaggaggccgaagaatcagctgattgtctctgaaaagaggacaacctatggtaccaatatcaaatagctcgtggggtctacattggactgtatttattgtgctttgcaatgattttggcaatatggggcgaaatttgctgtatttataacgaccacctgctagatttacgataaatcgaggtgcataaatgggtggaggcctagaattaaatggtacacatgtatgagcaaatgtattgaagtgttggtctatgacctacatagaacgcagctaaagctcagtaggggaacggaaggttaattcaccttcgccctcgtcctgtgtctctccacgaaaatccagatgctcgcctggtgcagcggtacagtgcttcccggtctcatcgctatcctcctgctcatgaaagattaacttggacatgataaggtatgttattggggtctattcagtaccggtggtatattttgagggtggtccttcatcgacagcacttaggtatgagggtttaacttgccccgagggtaccaatatggaggccaaaaattaaataaataattcgcgatttggtcggtacatgtatcatttgcgggaacccgggttcccgccaattgtttcacatgctaacatgtaaaatgctgttagaggcgaggagtcggaaaagctgtcgctggctatgtcgccggcaccccataactatttacgcatgcttgcagctatagtcgagtgtatggatagtgacattaaggggtggtccgcacaaaaagtaaaacgatgatcacgcccttagacgtctttctcaatttagtggtcctgaccccagccactccgcgtgttgtggtcgtttacctcccaacttaaaaaaaagaaacagctactatacagcagctgtgaatctctgcatttggcgccttgattttgcgttccataccatgaaatatccgactataggacctatccgagctgtaccaaaaccatggtaccctagaaggatggactactaaaaacaaatatataagtttgtatattatgttgtgggccacaccgattacacttttgctcatttttatgggaaacgtcaaaaggtgtatgcgttgggaaaacgtttgtcaataggtgtagtggtcgtgggcgtcacgtcgcgtcatgtctcatcatacacgtactgacacacgttttggttgccgcggtatttcggccgaggtcgggtcatacagacccaggatcgagcttccaagcacagtagtttattacgacacgctcgtagcgaacacggtcaactaataatagcatatagagcaactgtactcgacaacttcgctattgtgtctataaggaactaccaacgcaaaccgcaagcgtctatagcatggctgtactaggtaggttttgcatctgaatttcggaggtgaaggagctctagtgagagcccccaaccggaagagagtgtaggtattgtagaactgtggcaacgctgaggcctcgctacaatggataacaacgttcattgtagtccctcagccgtacaattcgctatcaaagtcatggacaccacgaaccgggctagttgcatcaggtagaagccttcctaaccccgggttttatggatttggatctaagcccacacaccagtcaccgcattcgttgctgatgcagctttatcatgcaccttagtgcgcttggaaccacatacacatactgtcataccgacaacctagcatacacctaatgacacgagttaaccgcttttgacaaaacgtttcaaattcatacatcttttgacattttccccatttttattctagcgttgggtggcgggcttgcgtggnnnnnnnnnnnnnnnnnnnnnnnnnnnnnnnnnnnnnnnnnnnnnnnnnnnnnnnnnnnnnnnnnnnnnnnnnnnnnnnnnnnnnnnnnnnnnnnnnnnngcgatccgatcgttcgctggtgacagcttttgcagctgttttcgttgatcactttaatctgtggctgtcaatccacgattgtgaaagtcacgcgcatggattgccgcgcatgacttacgcgatctcaagccatgtggtggcaaaggatggcacatcgcacaccggcgaatcgtgaaataaccgtgcattaacggatctcaaattcgcaccaattggaatcaccacaactgaactttacatcggggcgtttaacgcaacgttcaattcgcttcaaccatctaaagcggcgcgatcgttggtacatgtaactaacgaatacgtctgcctcaacttccaacgcacagaggtaactttctccttctgccttgtgcaatttaaaatgaaagtaggatttagcattatgtcgaagcgtggacgtatacaatgtgcttgaaacacccaacacgggcattgcacatagagacaacgtcacagttaatcgagaagggatatcttattttctaccaacgggccagcagaccgcgcgtataaccataacctggcaagttatctagacgcttctcgttggcctccattttaaatgagatcgttccgccgtgtatatcccatctagtatcgatgttagcgagatacctacttcacagaataaatgcttaacaacaacactgcttgcagtttgaagtgctcctcggatgattttggattaaattttacgttttagccgatcaaaatgcagtattgtggaaaatcttaaacaaaaactgcagttttagaaaataaatcggggcgttttaacgtgaagataagtgcagttctaaaatctcaaaaagcacttgtttagtaaagtacggtatgagtcaacagccgcaatgttgtccaccaccagcgagcctttccggcaaccactgtatcaataccagcttactgatgggagaattagagcttgcggtatgtaaaacagtacggttatgctaacacaagcattttattgtaaaccactccaattttgaagtttccaatgatgctatgagtcaggaggccgaagaatcagctgattgtctctgaaaagaggacaacctatggtaccaatatcaaatagctcgtggggtctacattggactgtatttattgtgctttgcaatgattttggcaatatggggcgaaatttgctgtatttataacgaccacctgctagatttacgataaatcgaggtgcataaatgggtggaggcctagaattaaatggtacacatgtatgagcaaatgtattgaagtgttggtctatgacctacatagaacgcagctaaagctcagtaggggaacggaaggttaattcaccttcgccctcgtcctgtgtctctccacgaaaatccagacgctcgcctggtgcagcggtacagtgcttcccggtctcatcgctatcctcctgctcatgaaagattaacttggacatgataaggtatgttattggggtctattcagtaccggtggtatattttgagggtggtccttcatcgacagcacttaggtatgagggtttaacttgccccgagggtaccaatatggaggccaaaaattaaataaataattcgcgatttggtcggtacatgtatcatttgcgggaacccgggttcccgccaattgtttcacatgctaacatgtaaaatgctgttagaggcgaggagtcggaaaagctgtcgctggctatgtcgccggcaccccataactatttacgcatgcttgcagctatagtcgagtgtatggatagtgacattaaggggtggtccgcacaaaaagtaaaacgatgatcacgcccttagacgtctttctcaatttagtggtcctggccccagccactccgcgtgttgtggtcgtttacctcccaacttaaaaaaaagaaacagctactatacagcagctgtgaatctctgcatttggcgccttgattttgcgttccataccatgaaatatccgactataggacctatccgacctgtaccaaaaccatggtaccctagaaggatggactctaaaaacaaatatataagtttgtatattatgttgtgggccacaccgattacacttttgctcatttttatgggaaacgtcaaaaggtgtatgcgttgggaaaacgtttgtcaataggtgtagtggtcgtgggcgtcacgtcgcgtcatgtctcatcatacacgtactgacacacgttttggttgccgcggtatttcggccgaggtcgggtcatacagacccaggatcgagcttccaagcacagtagtttattacgacacgctcgtagcgaacacggtcaactaataatagcatatagagcaactgtactcgacaacttcgctattgtgtctataaggaactaccaacgcaaaccgcaagcgtctatagcatggctgtactaggtaggttttgcatctgaatttcggaggtgaaggagctctagtgagagcccccaaccggaagagagtgtaggtattgtagaactgtggcaacgctgaggcctcgctacaatggataacgacgttcattgtagtccctcagccgtacaattcgctatcaaagtcatggacaccacgaaccgggctagttgcatcaggtagaagccttcctaaccccgggttttatggatttggatctaagcccacacaccagtcaccgcattcgttgctgatgcagctttatcatgcaccttagtgcgcttggaaccacatacacatactgtcataccgacaacctagcatacacctaatgacacgagttaaccgcttttgacaaaacgtttcaaattcatacatcttttgacattttccccatttttattctagcgttgggtggcgggcttgcgtggagggcagagtgccggaggccgcggcggtggcgccgagggaatccggccgcaggaaggcagcggcaggtagcaggctccaggacgacggtgaagccgcaggacgacggcggcaggaaggactggcgaagcggtggcaggtcggcggagcggaggcaggtcggtggctggctggacggcgaggcggcggcggcagggaggcagcagtaggacgtcgactggttggtggggcggtggcggggcggacggctgcccggagaaccttgatgacttgccaccacgctgcattgttataagattattcgttatataataaacgtatatttaataaaactcctccactgttaatgtacatgcctagcggcttcccttacgcgctcattatacacaccatgcacgctcatacattgctacatcacgacgtagagatggcaattttcagtttcaaatactgcatatgtacctcaattatggtgcaggtccgataaggtcggataaatgggatatatgcgtgtgatacgagtttatctaagaatttgtatagacatacagaaactctgccatgacctccctatgattggcgcaaataaatacaaatgctgtaattggctgttaataggcatacaataaataagtaaggtcggataactcgtcatattcaaccatatatttttgcagcgagcagagccagatccactgcgttgtatttcatcgtacacccagttttgatgagtccttataattaaaagcttcggcttggctccccacttcacctctcttttgagctgtgggccaagaaaaatggttgtgagatcgtgagctaatgtatgtgatacatacctttgaaacatcagcatatgtacatgtatatgaagcttccagggtcatcgatgtttggctctgagtcaaccggtacatgtattcattactgagcggtccttcaagcccggcgagtggatccggctgagtcaggtgggcttcccgacaggactcacgacttcgagcagtgcagatgtaacaattggactttgctcgaatcatcgcgcatgcggactgcatactgcagtctcgatcgattgcacttttcttctttgtgtccttcaccatacagaatattactttcttcttgagatgtgcgccagccgcttcgagagaccaggcttcaaaccaattttgactaaacttacaagtctcccatagtttgtattaggccgaagcacaggccagctgtttccactgatttttcgtcacctgtggcacgtagatatgcttcaaatcgtgggtttggagttcgtacaaacaacgccttacaggttacagcacccttagcgccctgcgacggaagtaggagtactgtagtgagctccagatttaatactgctcatgttgaaggaaccattgcatgtatttggtggatgacactattcattttcgactgaaatcgtatcgtatgcggctagtacatgtacgagccgaacaagcaagtttccctgataggtaacttctcaaataatcgatatcacagagtttgactgttgccccaaattaaagaaattaaaagttgcaagtgagcggtgattaatggcgcggggtccaaggacgttgagagagccttcgatctgaactaaaactccttagagctgaactaacagtcttgtcagtgaacaaacatcctgataatagaaatgaagtgctagggggtgaacataagcgcctgagtggtgaactgaaggggtgaaggagagcaaggttgcctagtccctccacgtgtcagccggcagaaaaggaaatgcttctcttgctctagcgagtcggtgccagtgacatcgaacctgcgtgcaccaatgagcagcacgggtgatgaagcgtcttggccatccttttgagcgccatcgtcttgaggttagcacgccaagggctttgtctattatgtgctagatcgaatggggtgcctatttttattaaagaagaactaactgctagagttactccgggctcgacggcgtttagctttgccttttcgtttggatctggccgggcggatagagctatcgccagcttcggcttcctcgctaccatcacgcagcgtgtttgcagatacatacgagaggacgtcctccacgtcgagccaccctaacgcggaaaacgtttgcattttacctggatgttggtcccgcgtcaagtagatgtcagagaagcttttgtcttcgcgacctgctgcaatcacctcgtgcagtttgcgccgagctcttgactcgtcgtcgcgccacttggccaccatgtcggacacttcatcctccgatgacaacaaggcaacagttgttgcgtcttcgatagctgtagccgccgctcgaattgcaccaacaacagagcttcggctgtcccctggtacctgccaacctacgtcgcttattaggcagctcagtatcgttgagaccgatcttaacgcttgcttggcttcgtccgacgnnnnnnnnnnnnnnnnnnnnnnnnnnnnnnnnnnnnnnnnnnnnnnnnnnnnnnnnnnnnnnnnnnnnnnnnnnnnnnnnnnnnnnnnnnnnnnnnnnnnnnnnnnnnnnnnnnnnnnnnnnnnnnnnnnnnnnnnnnnnnnnnnnnnnnnnnnnnnnnnnnnnnnnnnnnnnnnnnnnnnnnnnnnnnnnnnnnnnnnnnnnnnnnnnnnnnnnnnnnnnnnnnnnnnnnnnnnnnnnnnnnnnnnnnnnnnnnnnnnnnnnnnnnnnnnnnnnnnnnnnnnnnnnnnnnnnnnnnnnnnnnnnnnnnnnnnnnnnnnnnnnnnnnnnnnnnnnnnnnnnnnnnnnnnnnnnnnnnnnnnnnnnnnnnnnnnnnnnnnnnnnnnnnnnnnnnnnnnnnnnnnnnnnnnnnnnnnnnnnnnnnnnnnnnnnnnnnnnnnnnnnnnnnnnnnnnnnnnnnnnnnnnnnnnnnnnnnnnnnnnnnnnnnnnnnnnnnnnnnnnnnnnnnnnnnnnnnnnnnnnnnnnnnnnnnnnnnnnnnnnnnnnnnnnnnnnnnnnnnnnnnnnnnnnnnnnnnnnnnnnnnnnnnnnnnnnnnnnnnnnnnnnnnnnnnnnnnnnnnnnnnnnnnnnnnnnnnnnnnnnnnnnnnnnnnnnnnnnnnnnnnnnnnnnnnnnnnnnnnnnnnnnnnnnnnnnnnnnnnnnnnnnnnnnnnnnnnnnnnnnnnnnnnnnnnnnnnnnnnnnnnnnnnnnnnnnnnnnnnnnnnnnnnnnnnnnnnnnnnnnnnnnnnnnnnnnnnnnnnnnnnnnnnnnnnnnnnnnnnnnnnnnnnnnnnnnnnnnnnnnnnnnnnnnnnnnnnnnnnnnnnnnnnnnnnnnnnnnnnnnnnnnnnnnnnnnnnnnnnnnnnnnnnnnnnnnnnnnnnnnnnnnnnnnnnnnnnnnnnnnnnnnnnnnnnnnnnnnnnnnnnnnnnnnnnnnnnnnnnnnnnnnnnnnnnnnnnnnnnnnnnnnnnnnnnnnnnnnnnnnnnnnnnnnnnnnnnnnnnnnnnnnnnnnnnnnnnnnnnnnnnnnnnnnnnnnnnnnnnnnnnnnnnnnnnnnnnnnnnnnnnnnnnnnnnnnnnnnnnnnnnnnnnnnnnnnnnnnnnnnnnnnnnnnnnnnnnnnnnnnnnnnnnnnnnnnnnnnnnnnnnnnnnnnnnnnnnnnnnnnnnnnnnnnnnnnnnnnnnnnnnnnnnnnnnnnnnnnnnnnnnnnnnnnnnnnnnnnnnnnnnnnnnnnnnnnnnnnnnnnnnnnnnnnnnnnnnnnnnnnnnnnnnnnnnnnnnnnnnnnnnnnnnnnnnnnnnnnnnnnnnnnnnnnnnnnnnnnnnnnnnnnnnnnnnnnnnnnnnnnnnnnnnnnnnnnnnnnnnnnnnnnnnnnnnnnnnnnnnnnnnnnnnnnnnnnnnnnnnnnnnnnnnnnnnnnnnnnnnnnnnnnnnnnnnnnnnnnnnnnnnnnnnnnnnnnnnnnnnnnnnnnnnnnnnnnnnnnnnnnnnnnnnnnnnnnnnnnnnnnnnnnnnnnnnnnnnnnnnnnnnnnnnnnnnnnnnnnnnnnnnnnnnnnnnnnnnnnnnnnnnnnnnnnnnnnnnnnnnnnnnnnnnnnnnnnnnnnnnnnnnnnnnnnnnnnnnnnnnnnnnnnnnnnnnnnnnnnnnnnnnnnnnnnnnnnnnnnnnnnnnnnnnnnnnnnnnnnnnnnnnnnnnnnnnnnnnnnnnnnnnnnnnnnnnnnnnnnnnnnnnnnnnnnnnnnnnnnnnnnnnnnnnnnnnnnnnnnnnnnnnnnnnnnnnnnnnnnnnnnnnnnnnnnnnnnnnnnnnnnnnnnnnnnnnnnnnnnnnnnnnnnnnnnnnnnnnnnnnnnnnnnnnnnnnnnnnnnnnnnnnnnnnnnnnnnnnnnnnnnnnnnnnnnnnnnnnnnnnnnnnnnnnnnnnnnnnnnnnnnnnnnnnnnnnnnnnnnnnnnnnnnnnnnnnnnnnnnnnnnnnnnnnnnnnnnnnnnnnnnnnnnnnnnnnnnnnnnnnnnnnnnnnnnnnnnnnnnnnnnnnnnnnnnnnnnnnnnnnnnnnnnnnnnnnnnnnnnnnnnnnnnnnnnnnnnnnnnnnnnnnnnnnnnnnnnnnnnnnnnnnnnnnnnnnnnnnnnnnnnnnnnnnnnnnnnnnnnnnnnnnnnnnnnnnnnnnnnnnnnnnnnnnnnnnnnnnnnnnnnnnnnnnnnnnnnnnnnnnnnnnnnnnnnnnnnnnnnnnnnnnnnnnnnnnnnnnnnnnnnnnnnnnnnnnnnnnnnnnnnnnnnnnnnnnnnnnnnnnnnnnnnnnnnnnnnnnnnnnnnnnnnnnnnnnnnnnnnnnnnnnnnnnnnnnnnnnnnnnnnnnnnnnnnnnnnnnnnnnnnnnnnnnnnnnnnnnnnnnnnnnnnnnnnnnnnnnnnnnnnnnnnnnnnnnnnnnnnnnnnnnnnnnnnnnnnnnnnnnnnnnnnnnnnnnnnnnnnnnnnnnnnnnnnnnnnnnnnnnnnnnnnnnnnnnnnnnnnnnnnnnnnnnnnnnnnnnnnnnnnnnnnnnnnnnnnnnnnnnnnnnnnnnnnnnnnnnnnnnnnnnnnnnnnnnnnnnnnnnnnnnnnnnnnnnnnnnnnnnnnnnnnnnnnnnnnnnnnnnnnnnnnnnnnnnnnnnnnnnnnnnnnnnnnnnnnnnnnnnnnnnnnnnnnnnnnnnnnnnnnnnnnnnnnnnnnnnnnnnnnnnnnnnnnnnnnnnnnnnnnnnnnnnnnnnnnnnnnnnnnnnnnnnnnnnnnnnnnnnnnnnnnnnnnnnnnnnnnnnnnnnnnnnnnnnnnnnnnnnnnnnnnnnnnnnnnnnnnnnnnnnnnnnnnnnnnnnnnnnnnnnnnnnnnnnnnnnnnnnnnnnnnnnnnnnnnnnnnnnnnnnnnnnnnnnnnnnnnnnnnnnnnnnnnnnnnnnnnnnnnnnnnnnnnnnnnnnnnnnnnnnnnnnnnnnnnnnnnnnnnnnnnnnnnnnnnnnnnnnnnnnnnnnnnnnnnnnnnnnnnnnnnnnnnnnnnnnnnnnnnnnnnnnnnnnnnnnnnnnnnnnnnnnnnnnnnnnnnnnnnnnnnnnnnnnnnnnnnnnnnnnnnnnnnnnnnnnnnnnnnnnnnnnnnnnnnnnnnnnnnnnnnnnnnnnnnnnnnnnnnnnnnnnnnnnnnnnnnnnnnnnnnnnnnnnnnnnnnnnnnnnnnnnnnnnnnnnnnnnnnnnnnnnnnnnnnnnnnnnnnnnnnnnnnnnnnnnnnnnnnnnnnnnnnnnnnnnnnnnnnnnnnnnnnnnnnnnnnnnnnnnnnnnnnnnnnnnnnnnnnnnnnnnnnnnnnnnnnnnnnnnnnnnnnnnnnnnnnnnnnnnnnnnnnnnnnnnnnnnnnnnnnnnnnnnnnnnnnnnnnnnnnnnnnnnnnnnnnnnnnnnnnnnnnnnnnnnnnnnnnnnnnnnnnnnnnnnnnnnnnnnnnnnnnnnnnnnnnnnnnnnnnnnnnnnnnnnnnnnnnnnnnnnnnnnnnnnnnnnnnnnnnnnnnnnnnnnnnnnnnnnnnnnnnnnnnnnnnnnnnnnnnnnnnnnnnnnnnnnnnnnnnnnnnnnnnnnnnnnnnnnnnnnnnnnnnnnnnnnnnnnnnnnnnnnnnnnnnnnnnnnnnnnnnnnnnnnnnnnnnnnnnnnnnnnnnnnnnnnnnnnnnnnnnnnnnnnnnnnnnnnnnnnnnnnnnnnnnnnnnnnnnnnnnnnnnnnnnnnnnnnnnnnnnnnnnnnnnnnnnnnnnnnnnnnnnnnnnnnnnnnnnnnnnnnnnnnnnnnnnnnnnnnnnnnnnnnnnnnnnnnnnnnnnnnnnnnnnnnnnnnnnnnnnnnnnnnnnnnnnnnnnnnnnnnnnnnnnnnnnnnnnnnnnnnnnnnnnnnnnnnnnnnnnnnnnnnnnnnnnnnnnnnnnnnnnnnnnnnnnnnnnnnnnnnnnnnnnnnnnnnnnnnnnnnnnnnnnnnnnnnnnnnnnnnnnnnnnnnnnnnnnnnnnnnnnnnnnnnnnnnnnnnnnnnnnnnnnnnnnnnnnnnnnnnnnnnnnnnnnnnnnnnnnnnnnnnnnnnnnnnnnnnnnnnnnnnnnnnnnnnnnnnnnnnnnnnnnnnnnnnnnnnnnnnnnnnnnnnnnnnnnnnnnnnnnnnnnnnnnnnnnnnnnnnnnnnnnnnnnnnnnnnnnnnnnnnnnnnnnnnnnnnnnnnnnnnnnnnnnnnnnnnnnnnnnnnnnnnnnnnnnnnnnnnnnnnnnnnnnnnnnnnnnnnnnnnnnnnnnnnnnnnnnnnnnnnnnnnnnnnnnnnnnnnnnnnnnnnnnnnnnnnnnnnnnnnnnnnnnnnnnnnnnnnnnnnnnnnnnnnnnnnnnnnnnnnnnnnnnnnnnnnnnnnnnnnnnnnnnnnnnnnnnnnnnnnnnnnnnnnnnnnnnnnnnnnnnnnnnnnnnnnnnnnnnnnnnnnnnnnnnnnnnnnnnnnnnnnnnnnnnnnnnnnnnnnnnnnnnnnnnnnnnnnnnnnnnnnnnnnnnnnnnnnnnnnnnnnnnnnnnnnnnnnnnnnnnnnnnnnnnnnnnnnnnnnnnnnnnnnnnnnnnnnnnnnnnnnnnnnnnnnnnnnnnnnnnnnnnnnnnnnnnnnnnnnnnnnnnnnnnnnnnnnnnnnnnnnnnnnnnnnnnnnnnnnnnnnnnnnnnnnnnnnnnnnnnnnnnnnnnnnnnnnnnnnnnnnnnnnnnnnnnnnnnnnnnnnnnnnnnnnnnnnnnnnnnnnnnnnnnnnnnnnnnnnnnnnnnnnnnnnnnnnnnnnnnnnnnnnnnnnnnnnnnnnnnnnnnnnnnnnnnnnnnnnnnnnnnnnnnnnnnnnnnnnnnnnnnnnnnnnnnnnnnnnnnnnnnnnnnnnnnnnnnnnnnnnnnnnnnnnnnnnnnnnnnnnnnnnnnnnnnnnnnnnnnnnnnnnnnnnnnnnnnnnnnnnnnnnnnnnnnnnnnnnnnnnnnnnnnnnnnnnnnnnnnnnnnnnnnnnnnnnnnnnnnnnnnnnnnnnnnnnnnnnnnnnnnnnnnnnnnnnnnnnnnnnnnnnnnnnnnnnnnnnnnnnnnnnnnnnnnnnnnnnnnnnnnnnnnnnnnnnnnnnnnnnnnnnnnnnnnnnnnnnnnnnnnnnnnnnnnnnnnnnnnnnnnnnnnnnnnnnnnnnnnnnnnnnnnnnnnnnnnnnnnnnnnnnnnnnnnnnnnnnnnnnnnnnnnnnnnnnnnnnnnnnnnnnnnnnnnnnnnnnnnnnnnnnnnnnnnnnnnnnnnnnnnnnnnnnnnnnnnnnnnnnnnnnnnnnnnnnnnnnnnnnnnnnnnnnnnnnnnnnnnnnnnnnnnnnnnnnnnnnnnnnnnnnnnnnnnnnnnnnnnnnnnnnnnnnnnnnnnnnnnnnnnnnnnnnnnnnnnnnnnnnnnnnnnnnnnnnnnnnnnnnnnnnnnnnnnnnnnnnnnnnnnnnnnnnnnnnnnnnnnnnnnnnnnnnnnnnnnnnnnnnnnnnnnnnnnnnnnnnnnnnnnnnnnnnnnnnnnnnnnnnnnnnnnnnnnnnnnnnnnnnnnnnnnnnnnnnnnnnnnnnnnnnnnnnnnnnnnnnnnnnnnnnnnnnnnnnnnnnnnnnnnnnnnnnnnnnnnnnnnnnnnnnnnnnnnnnnnnnnnnnnnnnnnnnnnnnnnnnnnnnnnnnnnnnnnnnnnnnnnnnnnnnnnnnnnnnnnnnnnnnnnnnnnnnnnnnnnnnnnnnnnnnnnnnnnnnnnnnnnnnnnnnnnnnnnnnnnnnnnnnnnnnnnnnnnnnnnnnnnnnnnnnnnnnnnnnnnnnnnnnnnnnnnnnnnnnnnnnnnnnnnnnnnnnnnnnnnnnnnnnnnnnnnnnnnnnnnnnnnnnnnnnnnnnnnnnnnnnnnnnnnnnnnnnnnnnnnnnnnnnnnnnnnnnnnnnnnnnnnnnnnnnnnnnnnnnnnnnnnnnnnnnnnnnnnnnnnnnnnnnnnnnnnnnnnnnnnnnnnnnnnnnnnnnnnnnnnnnnnnnnnnnnnnnnnnnnnnnnnnnnnnnnnnnnnnnnnnnnnnnnnnnnnnnnnnnnnnnnnnnnnnnnnnnnnnnnnnnnnnnnnnnnnnnnnnnnnnnnnnnnnnnnnnnnnnnnnnnnnnnnnnnnnnnnnnnnnnnnnnnnnnnnnnnnnnnnnnnnnnnnnnnnnnnnnnnnnnnnnnnnnnnnnnnnnnnnnnnnnnnnnnnnnnnnnnnnnnnnnnnnnnnnnnnnnnnnnnnnnnnnnnnnnnnnnnnnnnnnnnnnnnnnnnnnnnnnnnnnnnnnnnnnnnnnnnnnnnnnnnnnnnnnnnnnnnnnnnnnnnnnnnnnnnnnnnnnnnnnnnnnnnnnnnnnnnnnnnnnnnnnnnnnnnnnnnnnnnnnnnnnnnnnnnnnnnnnnnnnnnnnnnnnnnnnnnnnnnnnnnnnnnnnnnnnnnnnnnnnnnnnnnnnnnnnnnnnnnnnnnnnnnnnnnnnnnnnnnnnnnnnnnnnnnnnnnnnnnnnnnnnnnnnnnnnnnnnnnnnnnnnnnnnnnnnnnnnnnnnnnnnnnnnnnnnnnnnnnnnnnnnnnnnnnnnnnnnnnnnnnnnnnnnnnnnnnnnnnnnnnnnnnnnnnnnnnnnnnnnnnnnnnnnnnnnnnnnnnnnnnnnnnnnnnnnnnnnnnnnnnnnnnnnnnnnnnnnnnnnnnnnnnnnnnnnnnnnnnnnnnnnnnnnnnnnnnnnnnnnnnnnnnnnnnnnnnnnnnnnnnnnnnnnnnnnnnnnnnnnnnnnnnnnnnnnnnnnnnnnnnnnnnnnnnnnnnnnnnnnnnnnnnnnnnnnnnnnnnnnnnnnnnnnnnnnnnnnnnnnnnnnnnnnnnnnnnnnnnnnnnnnnnnnnnnnnnnnnnnnnnnnnnnnnnnnnnnnnnnnnnnnnnnnnnnnnnnnnnnnnnnnnnnnnnnnnnnnnnnnnnnnnnnnnnnnnnnnnnnnnnnnnnnnnnnnnnnnnnnnnnnnnnnnnnnnnnnnnnnnnnnnnnnnnnnnnnnnnnnnnnnnnnnnnnnnnnnnnnnnnnnnnnnnnnnnnnnnnnnnnnnnnnnnnnnnnnnnnnnnnnnnnnnnnnnnnnnnnnnnnnnnnnnnnnnnnnnnnnnnnnnnnnnnnnnnnnnnnnnnnnnnnnnnnnnnnnnnnnnnnnnnnnnnnnnnnnnnnnnnnnnnnnnnnnnnnnnnnnnnnnnnnnnnnnnnnnnnnnnnnnnnnnnnnnnnnnnnnnnnnnnnnnnnnnnnnnnnnnnnnnnnnnnnnnnnnnnnnnnnnnnnnnnnnnnnnnnnnnnnnnnnnnnnnnnnnnnnnnnnnnnnnnnnnnnnnnnnnnnnnnnnnnnnnnnnnnnnnnnnnnnnnnnnnnnnnnnnnnnnnnnnnnnnnnnnnnnnnnnnnnnnnnnnnnnnnnnnnnnnnnnnnnnnnnnnnnnnnnnnnnnnnnnnnnnnnnnnnnnnnnnnnnnnnnnnnnnnnnnnnnnnnnnnnnnnnnnnnnnnnnnnnnnnnnnnnnnnnnnnnnnnnnnnnnnnnnnnnnnnnnnnnnnnnnnnnnnnnnnnnnnnnnnnnnnnnnnnnnnnnnnnnnnnnnnnnnnnnnnnnnnnnnnnnnnnnnnnnnnnnnnnnnnnnnnnnnnnnnnnnnnnnnnnnnnnnnnnnnnnnnnnnnnnnnnnnnnnnnnnnnnnnnnnnnnnnnnnnnnnnnnnnnnnnnnnnnnnnnnnnnnnnnnnnnnnnnnnnnnnnnnnnnnnnnnnnnnnnnnnnnnnnnnnnnnnnnnnnnnnnnnnnnnnnnnnnnnnnnnnnnnnnnnnnnnnnnnnnnnnnnnnnnnnnnnnnnnnnnnnnnnnnnnnnnnnnnnnnnnnnnnnnnnnnnnnnnnnnnnnnnnnnnnnnnnnnnnnnnnnnnnnnnnnnnnnnnnnnnnnnnnnnnnnnnnnnnnnnnnnnnnnnnnnnnnnnnnnnnnnnnnnnnnnnnnnnnnnnnnnnnnnnnnnnnnnnnnnnnnnnnnnnnnnnnnnnnnnnnnnnnnnnnnnnnnnnnnnnnnnnnnnnnnnnnnnnnnnnnnnnnnnnnnnnnnnnnnnnnnnnnnnnnnnnnnnnnnnnnnnnnnnnnnnnnnnnnnnnnnnnnnnnnnnnnnnnnnnnnnnnnnnnnnnnnnnnnnnnnnnnnnnnnnnnnnnnnnnnnnnnnnnnnnnnnnnnnnnnnnnnnnnnnnnnnnnnnnnnnnnnnnnnnnnnnnnnnnnnnnnnnnnnnnnnnnnnnnnnnnnnnnnnnnnnnnnnnnnnnnnnnnnnnnnnnnnnnnnnnnnnnnnnnnnnnnnnnnnnnnnnnnnnnnnnnnnnnnnnnnnnnnnnnnnnnnnnnnnnnnnnnnnnnnnnnnnnnnnnnnnnnnnnnnnnnnnnnnnnnnnnnnnnnnnnnnnnnnnnnnnnnnnnnnnnnnnnnnnnnnnnnnnnnnnnnnnnnnnnnnnnnnnnnnnnnnnnnnnnnnnnnnnnnnnnnnnnnnnnnnnnnnnnnnnnnnnnnnnnnnnnnnnnnnnnnnnnnnnnnnnnnnnnnnnnnnnnnnnnnnnnnnnnnnnnnnnnnnnnnnnnnnnnnnnnnnnnnnnnnnnnnnnnnnnnnnnnnnnnnnnnnnnnnnnnnnnnnnnnnnnnnnnnnnnnnnnnnnnnnnnnnnnnnnnnnnnnnnnnnnnnnnnnnnnnnnnnnnnnnnnnnnnnnnnnnnnnnnnnnnnnnnnnnnnnnnnnnnnnnnnnnnnnnnnnnnnnnnnnnnnnnnnnnnnnnnnnnnnnnnnnnnnnnnnnnnnnnnnnnnnnnnnnnnnnnnnnnnnnnnnnnnnnnnnnnnnnnnnnnnnnnnnnnnnnnnnnnnnnnnnnnnnnnnnnnnnnnnnnnnnnnnnnnnnnnnnnnnnnnnnnnnnnnnnnnnnnnnnnnnnnnnnnnnnnnnnnnnnnnnnnnnnnnngagtgttgaaaccgagtatagacccggattcgctgtccaacgagttgagtataacacaccttcagtatcagcagaagcgcgagggcttctttctctgccgggtgataattcatctcagcgtccttcaaaacgcgtccgcagaagcgaacggggtgtagtttgccctcgtactcttgcatcaacgtggagcttagggcccactcgttggcgaacaacataacatggattctcctctttcggtcgaagtgtcgtagtatcggcgctgccgaaaccttctgttggagcatcgcgaagctgtgcttggccgcggtgaggtcaccccgggtgcaagtcctcgtccttaagctggtacagcgctgcttcatagaccgcgaagtcttggatgaagcgactgtaatagttgagtgccccaaggaaggactgcattcctttcttcgttgacgggaacggaagctcggtcaccccagccagcttcttagcgtctggtcggatatcttttgccgagacttcgtgagacagaaagtccacattggactgcacgaagatgctcttcgtgaagctgatactaatacggcactcttcaatccgtgccagcaatcggtctagcgtcgccaagcatgactcgaaagtctcggcgccgaaaaagatatcatccacgaatgaccggcgactgaatactggtgtcaacgaggagtcatcgggctccccgttggcgaacatgtcggcgatagggctgttgaccagttcggctacagctcccttaccaagcgagttatctcggtcagcctcgaacttggcccggaatggctttgccgtgccagtcgaagcctcgttcaccccagcatgagcttccttgtcatgttcttcagctaggcgcatgcactccgagaatttaaaccatcctcccttcggttggacgaagccccaaagcgcgatgtcaatcatgcgttgatagatcggtgcgtttttcaggccgaaaggcatacgcaaccactcgaagtgccccagtgcgcagacgaaagcggagatattccgagctcgttcagtcatcataatggcctagaagccgctagcagcgtcgagcgagcaaaaccataagtacgcctccatgtccgtcagcaagtcatccaccaggggcatggcgtactccataatcttggtgatcgcattaacgagtttgtagtcgatacacaggcggatatccactccattcttcttcaggacgatgacgattggcgacgcccatgggctgtccgagaaggagataagcccggccttcagcagacccttcagcaattcgtacagcttaccgaggaagcgaagcggggtccgccgagtcttctgcttgatcggcgcgtgcccctgtacattgatgtcacatacaacaccataggctggaggcggtagagcgttgccgctcgcaatcatgattttctcgtggatcttcagcacatcgaccaggtccgtctgctgcttctcactgagctcgtcattctggacgttctgcccagagtaatccaatgtcgtctccgacgcttcagttaggtctggcaagaacgctagctcttgtgcgtagtcggttagctcaatctcgtttgctacgtgctccgaaacgtcgttcgatgtgtcctcaccctcgacagacccttctgcaaccatggcgtgcatgaccgagatataggtcggcctccagcagctgctcagggtcagtgatcgggtttacatccgaatcatggaattcagtgtcggcgtcggcggtgggggttccggcttgagtaggaacgtcgttaggccctggatcgtgttcaccccagtcgactttgctactacacaccgcagtcgacgtttctcctggctccaggctgggcgcagcggtcccagaagctccaaggatgagatccttgttgttttgagctgtatcagggcatgcacttagtagcgataggttaccaagatcaacgtttgaactatttagctttagtgagctacagctaattgaattgatcccagtgatagctcgaatagcatctaataccagtgctgtcatcggcgatgcctcgccgagcgtaatcgatgagatagctcatccgatagtcggtcttgttgtcaagactgatgtgacgacgcctcgccaagcgaccgtgtgacgcgaacgcgtcatcagtgaggtcggcgtgaccttcactgtgttgtaccgcaatcattcaggtgattacgggacgatgattacgtcacggtgattacgccatgattgtgggtgcaagattgtgggtacaagatgggcatcgacgtggtgttctctgattggataaggtaactgtgtatccagtagagaatccagtagggtgtatccagtaagaggtatccagtagcaggcttagaggtagcacgcggttgcgaactaaggacctgaatcgaatcactttgcattttgccaactactgctcaagtgttcttccttttggttatgagcccaagccccgtcttccctgaccaagaccccgactacgccttcgccatggacgccgccccgaccgcgaccgcccgcatcaacaagttcgacggaaccaacttccacacatggaagttcaagatgcagatggtgctggaggagcgcgaactgtgggaagtgacgagtggggaagtgaagctcgagcagtgcacgaccgcggcggaccaagcgacgtttcgcaagaagtcgcgcaaggcgctggcgatcgtctgtctcgcgttggaggactcgcagctgccgctggtgcggtcggcgaaggacgcgcatgatgcatggtcaagactcgagggacacttcgagaagaagagcctggcgaacaagctctttcttcgtcgacggttcttcacgacaacgatggacgaaggtgatgatgtgctggagcacattaacaagctcaagacgctggcggaacagctcgacgcggtcggcgctccggtcagcgaggacgacttggtgatcacgcttcttgccagtctgagcgagtcgtaccagttcctcatcacggcgttggaatcgcgttccgacacgctgacgtgggagctcgtgacgtctcggctcctgcacgaggacatgaagcgcaagggacggcaggcgcaagcgcagaggacgagcgcctgtcactactgcggcgagcacggacattggatcgccaagtgtccggtgcggatccgcgagaacggggagcggcagaggccgcaacgagcgaacgtcgcgcaggtcgaagatgactctggcgacttcctcttctcggttggtggcgacacgggtgcctccaagctgagcggcatgtggctggtcgactcaggtgcgacgcagcacatgacgtactcgaaggagtacatgaagaactacaagaagatctctccggtggacgtgcatctggcggacgacggcgtggttcaggcggtggggagcggcgacatcgtgatgtcgatgcagacaccgcgcggcatgaagaagggtgtgctcacgggtgtgtggcacatcgcgaagctgtcgcgcaacctgttctccgtcggccgcttcaccaaggacgtcgggccagtgaccttcgagagcgacgggtgcttcgcggaaacgaagggtctcaagtggaagctcggcgctcgcgaaggcaaaggactgttcaagctctgcatgacgccgaggacgcctgctgacgaggccaatgcggcaagctcgaagaatcgccaaggggacaccacgtcgtacctctggcaccttcgacttggtcacatcggccatggtggtctcgacgccatcgtcaagaagggctacggcactggcatcccaatgacgtcggtgaagcagtgggaggtgtgcgacgggtgcgcactcggcaagcaaacgcgagtaagcttcatgaagtcgtcgccgaaccgtgcgaagcaagtgctggaggtggtccacagcgatgtgtgcggtccgatgcagacggcgacgttcggaggcaagcgctactcgtcacgtcnnnnnnnnnnnnnnnnnnnnnnnnnnnnnnnnnnnnnnnnnnnnnnnnnnnnnnnnnnnnnnnnnnnnnnnnnnnnnnnnnnnnnnnnnnnnnnnnnnnnnnnnnnnnnnnnnnnnnnnnnnnnnnnnnnnnnnnnnnnnnnnnnnnnnnnnnnnnnnnnnnnnnnnnnnnnnnnnnnnnnnnnnnnnnnnnnnnnnnnnnnnnnnnnnnnnnnnnnnnnnnnnnnnnnnnnnnnnnnnnnnnnnnnnnnnnnnnnnnnnnnnnnnnnnnnnnnnnnnnnnnnnnnnnnnnnnnnnnnnnnnnnnnnnnnnnnnnnnnnnnnnnnnnnnnnnnnnnnnnnnnnnnnnnnnnnnnnnnnnnnnnnnnnnnnnnnnnnnnnnnnnnnnnnnnnnnnnnnnnnnnnnnnnnnnnnnnnnnnnnnnnnnnnnnnnnnnnnnnnnnnnnnnnnnnnnnnnnnnnnnnnnnnnnnnnnnnnnnnnnnnnnnnnnnnnnnnnnnnnnnnnnnnnnnnnnnnnnnnnnnnnnnnnnnnnnnnnnnnnnnnnnnnnnnnnnnnnnnnnnnnnnnnnnnnnnnnnnnnnnnnnnnnnnnnnnnnnnnnnnnnnnnnnnnnnnnnnnnnnnnnnnnnnnnnnnnnnnnnnnnnnnnnnnnnnnnnnnnnnnnnnnnnnnnnnnnnnnnnnnnnnnnnnnnnnnnnnnnnnnnnnnnnnnnnnnnnnnnnnnnnnnnnnnnnnnnnnnnnnnnnnnnnnnnnnnnnnnnnnnnnnnnnnnnnnnnnnnnnnnnnnnnnnnnnnnnnnnnnnnnnnnnnnnnnnnnnnnnnnnnnnnnnnnnnnnnnnnnnnnnnnnnnnnnnnnnnnnnnnnnnnnnnnnnnnnnnnnnnnnnnnnnnnnnnnnnnnnnnnnnnnnnnnnnnnnnnnnnnnnnnnnnnnnnnnnnnnnnnnnnnnnnnnnnnnnnnnnnnnnnnnnnnnnnnnnnnnnnnnnnnnnnnnnnnnnnnnnnnnnnnnnnnnnnnnnnnnnnnnnnnnnnnnnnnnnnnnnnnnnnnnnnnnnnnnnnnnnnnnnnnnnnnnnnnnnnnnnnnnnnnnnnnnnnnnnnnnnnnnnnnnnngcaagactgtgggtacaagatgggcatcgacgtggcgttctctgattggataaggtaactgtgtatccagtagagaatccagtagggtgtatccagtaagaggtatccagtagcaggcttagaggtagcacgcggttgcgaactaaggacctgaatcgaatcactttgcattttgccaactactgctcaagtgttcttccttttggttatgagcccaagccccgtcttccctgaccaagaccccgactacgccttcgccatggacgccgccccgaccgcgaccgcccgcatcaacaagttcaacggaaccaacttccacacatggaagttcaagatgcagatggtgctggaggagcgcgaactgtgggaagtgacgagtggggaagtgaagctcgagcagtgcacgaccgcggcggaccaagcgacgtttcgcaagaagtcgcgcaaggcgctggcgatcgtctgtctcgcgttggaggactcgcagctgccgctggtgcggtcggcgaaggacgcgcatgatgcatggtcaagactcgagggacacttcgagaagaagagcctggcgaacaagctctttcttcgtcgacggtttttcacgacaacgatggacgaaggtgatgatgtgctggagcacattaacaagctcaagacgctggcggaacagctcgacgcggtcggcgctccgatcagcgaggacgacttggtgatcacgcttcttgccagtctgagcgagtcgtaccagttcctcatcacggcgttggaatcgcgttccgacacgctgacgtgggagctcgtgacgtctcggctcctgcacgaggacatgaagcgcaaggaacaaggtggcggtgctgacggaaccgcgcacgctcaaggtcaagcgttcatgacaagcgacaacgggaagcgcaagggacggcaggcgcaagcgcagaggacgagcgcctgtcactactgcggcgagcacggacattggatcgccaagtgtccggtgcggatccgcgagaacggggagcggcagaggccgcaacgagcgaacgtcgcgcaggtcgaagatgactctggcgacttcctcttctcggttggtggcgacacgggtgcctccaagctgagcggcatgtggttggtcgactcgggtgcgacgcagcacatgacgtactcgaaggagtacatgaagaactacaagaagatctctccggtggacgtgcatctggcggacgacggcgtggttcaggcggtggggagcggcgacatcgtgatgtcgatgcagacaccgcgcggcatgaagaagggtgtgctcacgggtgtgtggcacatcccgaagctgtcgcgcaacctgttctccgtcggccgcttcaccaaggacgtcgggccagtgaccttcgagagcgacgggtgctttgcggaaacgaagggtctcaagtggaagctcggcgctcgcgaaggcaaaggactgttcaagctctgcatgacgccgaggacgcctgctgacgaggccaatgcggcaagctcgaagaatcgccaaggggacaccacgtcgtacctctggcaccttcgacttggtcacatcggccatggtggtctcgacgccatcgtcaagaagggctacggcactggcatcccaatgacgtcggtgaagcagtgggaggtgtgcgacgggtgcgcactcggcaagcaaacgcgagtaagcttcatgaagtcgtcgccgaaccgtgcgaagcaagtgctggaggtggtccacagcgatgtgtgcggtccgatgcagacggcgacgttcggaggcaagcgctacttcgtcacgttcatcgacgacaagtcgcacttctgcgtggtgtacctgctacggaacaagtcggaggtggctgccaagttcgctgcgttcgtcgcgttggctgagacgcagaccggcaagcgagtgaaggtgcttcggagcgacaacggcggcgagtacacttcgggtgcgatggccaagttgtgtgcggatcgcggcatcgagcagaagttcacaccaccatacacgcctcagctcaacggagtggccgagcgaataaaaggaagagcacttgagcagtagttggcaaaatgcaaagtgattcgattcaggtccttagttcgcaaccgcgtgctacctctaagcctgctactggatacctcttactggatacaccctactggattctctactggatacacagttaccttatccaatcagagaacgccacgtcgatgcccatcttgtacccacaatcttggcgtaatcaccgtgacgtaatcatcgtcccgtaatcacctgaatgatttcggtaccacacagtgaaggtcacgccgacctcactgatgacgcgttcgcgtcacacggtcgcttggcggggcgtcgtcacatcagtcttgacaacactcccactcgactcgtcagcgaccacgatgcccagcttcgtcctgagcgcgtcgaactgcggcgccgcgatcggcttcgtcatgatgtccgccagcatgtcgagtgtcgaaacatactgcaacaccacttgaccgtcttccaccttctcgcgcacgaagtggtagcgaatgtcgatgtgcttggtgcgcttgtggaactccgggttcttggccaacgcgatggagccttggttgtcctcgtagatcttcaccccttcatcgctcgccatctcgcccagctcgcacagaaacaccttgagccacaccgcctcctgcgtggcctccgacagcgccatgtactcggcttccgtcgacgagagcgccaccgtgcgctgcttcttgcttcgccagctgatgcatccgccgttcatcatgaacgcgtagccgctcgtactccgtcgagactcgatgtcgccggcccagtccgcgtccgagtagccttgcagtccgtcctcgctgctcgcttgaaacacgaggccgtgcgtcttcgtgcctcggatgtagcggaagaccctcttgagcgcctgccagtgtgtcggacatgggtccgctgcgaactggctcagcactcccactgccgctgcgaggtccggacgagtccccaccatgagatacatgaggcagcccacggcgttccggtacggaacattcgccatggtctcgtcgtgcttgcagcctccctcgcacatggccttggtcagcttcagacccggatcctgcggtgtcttcacagggttgctctcatccatcttgaacttctcgagaatgtccttcgcgaacttggtctgccgcaccgacaccttcccagtcgccacatcttgctcgatctccataccgaggaagtacttgagctggcccatgtcagtcatctcgaaccggtcactcagcgcctgcttcgtgtccttcagcatcccgtcgctgctgctggcgaggaccagatcgtccacgtacagtgccacgaacatcatgtcgtgattgtcccgcttcaagtagatgcagtggtcggactcgcacttcttgaaccccagcttcaacatgaactcgtcgatcgtcttgttccacatccgcggcgactgcttcaggccgtacagcgaacgcttgagccggcacacgtagtcgggtcgatctccgtccacatatccgtccggctgcgccatgtagatgtcctcgtccaacaagccgttgaggaacgcggtcttcacatccatctggtgcactgtgagcttgtacttggccgccagactcagcaacacccgaatcgacgtgaacttggccaccggcgcgaacgtctcgtcgtagtcgatgccgtacttctgcgagaaccccttcgccaccagtcgcgccttgaaccgctcgatctctccagactggttctccttcacgcggaacacccatctgcagccgatcgccttgcgtcccttcggcagtggcaccagggtccacgtctcgttcttgcggagcgactccacctccgagtcgcacgcctctttccacttgtctgcgtcgctggattccatcgccgacttgaacgttgtcggcatctctcccactaatccnnnnnnnnnnnnnnnnnnnnnnnnnnnnnnnnnnnnnnnnnnnnnnnnnnnnnnnnnnnnnnnnnnnnnnnnnnnnnnnnnnnnnnnnnnnnnnnnnnnnnnnnnnnnnnnnnnnnnnnnnnnnnnnnnnnnnnnnnnnnnnnnnnnnnnnnnnnnnnnnnnnnnnnnnnnnnnnnnnnnnnnnnnnnnnnnnnnnnnnnnnnnnnnnnnnnnnnnnnnnnnnnnnnnnnnnnnnnnnnnnnnnnnnnnnnnnnnnnnnnnnnnnnnnnnnnnnnnnnnnnnnnnnnnnnnnnnnnnnnnnnnnnnnnnnnnnnnnnnnnnnnnnnnnnnnnnnnnnnnnnnnnnnnnnnnnnnnnnnnnnnnnnnnnnnnnnnnnnnnnnnnnnnnnnnnnnnnnnnnnnnnnnnnnnnnnnnnnnnnnnnnnnnnnnnnnnnnnnnnnnnnnnnnnnnnnnnnnnnnnnnnnnnnnnnnnnnnnnnnnnnnnnnnnnnnnnnnnnnnnnnnnnnnnnnnnnnnnnnnnnnnnnnnnnnnnnnnnnnnnnnnnnnnnnnnnnnnnnnnnnnnnnnnnnnnnnnnnnnnnnnnnnnnnnnnnnnnnnnnnnnnnnnnnnnnnnnnnnnnnnnnnnnnnnnnnnnnnnnnnnnnnnnnnnnnnnnnnnnnnnnnnnnnnnnnnnnnnnnnnnnnnnnnnnnnnnnnnnnnnnnnnnnnnnnnnnnnnnnnnnnnnnnnnnnnnnnnnnnnnnnnnnnnnnnnnnnnnnnnnnnnnnnnnnnnnnnnnnnnnnnnnnnnnnnnnnnnnnnnnnnnnnnnnnnnnnnnnnnnnnnnnnnnnnnnnnnnnnnnnnnnnnnnnnnnnnnnnnnnnnnnnnnnnnnnnnnnnnnnnnnnnnnnnnnnnnnnnnnnnnnnnnnnnnnnnnnnnnnnnnnnnnnnnnnnnnnnnnnnnnnnnnnnnnnnnnnnnnnnnnnnnnnnnnnnnnnnnnnnnnnnnnnnnnnnnnnnnnnnnnnnnnnnnnnnnnnnnnnnnnnnnnnnnnnnnnnnnnnnnnnnnnnnnnnnnnnnnnnnnnnnnnnnnnnnnnnnnnnnnnnnnnnnnnnnnnnnnnnnnnnnnnnnnnnnnnnnnnnnnnnnnnnnnnnnnnnnnnnnnnnnnnnnnnnnnnnnnnnnnnnnnnnnnnnnnnnnnnnnnnnnnnnnnnnnnnnnnnnnnnnnnnnnnnnnnnnnnnnnnnnnnnnnnnnnnnnnnnnnnnnnnnnnnnnnnnnnnnnnnnnnnnnnnnnnnnnnnnnnnnnnnnnnnnnnnnnnnnnnnnnnnnnnnnnnnnnnnnnnnnnnnnnnnnnnnnnnnnnnnnnnnnnnnnnnnnnnnnnnnnnnnnnnnnnnnnnnnnnnnnnnnnnnnnnnnnnnnnnnnnnnnnnnnnnnnnnnnnnnnnnnnnnnnnnnnnnnnnnnnnnnnnnnnnnnnnnnnnnnnnnnnnnnnnnnnnnnnnnnnnnnnnnnnnnnnnnnnnnnnnnnnnnnnnnnnnnnnnnnnnnnnnnnnnnnnnnnnnnnnnnnnnnnnnnnnnnnnnnnnnnnnnnnnnnnnnnnnnnnnnnnnnnnnnnnnnnnnnnnnnnnnnnnnnnnnnnnnnnnnnnnnnnnnnnnnnnnnnnnnnnnnnnnnnnnnnnnnnnnnnnnnnnnnnnnnnnnnnnnnnnnnnnnnnnnnnnnnnnnnnnnnnnnnnnnnnnnnnnnnnnnnnnnnnnnnnnnnnnnnnnnnnnnnnnnnnnnnnnnnnnnnnnnnnnnnnnnnnnnnnnnnnnnnnnnnnnnnnnnnnnnnnnnnnnnnnnnnnnnnnnnnnnnnnnnnnnnnnnnnnnnnnnnnnnnnnnnnnnnnnnnnnnnnnnnnnnnnnnnnnnnnnnnnnnnnnnnnnnnnnnnnnnnnnnnnnnnnnnnnnnnnnnnnnnnnnnnnnnnnnnnnnnnnnnnnnnnnnnnnnnnnnnnnnnnnnnnnnnnnnnnnnnnnnnnnnnnnnnnnnnnnnnnnnnnnnnnnnnnnnnnnnnnnnnnnnnnnnnnnnnnnnnnnnnnnnnnnnnnnnnnnnnnnnnnnnnnnnnnnnnnnnnnnnnnnnnnnnnnnnnnnnnnnnnnnnnnnnnnnnnnnnnnnnnnnnnnnnnnnnnnnnnnnnnnnnnnnnnnnnnnnnnnnnnnnnnnnnnnnnnnnnnnnnnnnnnnnnnnnnnnnnnnnnnnnnnnnnnnnnnnnnnnnnnnnnnnnnnnnnnnnnnnnnnnnnnnnnnnnnnnnnnnnnnnnnnnnnnnnnnnnnnnnnnnnnnnnnnnnnnnnnnnnnnnnnnnnnnnnnnnnnnnnnnnnnnnnnnnnnnnnnnnnnnnnnnnnnnnnnnnnnnnnnnnnnnnnnnnnnnnnnnnnnnnnnnnnnnnnnnnnnnnnnnnnnnnnnnnnnnnnnnnnnnnnnnnnnnnnnnnnnnnnnnnnnnnnnnnnnnnnnnnnnnnnnnnnnnnnnnnnnnnnnnnnnnnnnnnnnnnnnnnnnnnnnnnnnnnnnnnnnnnnnnnnnnnnnnnnnnnnnnnnnnnnnnnnnnnnnnnnnnnnnnnnnnnnnnnnnnnnnnnnnnnnnnnnnnnnnnnnnnnnnnnnnnnnnnnnnnnnnnnnnnnnnnnnnnnnnnnnnnnnnnnnnnnnnnnnnnnnnnnnnnnnnnnnnnnnnnnnnnnnnnnnnnnnnnnnnnnnnnnnnnnnnnnnnnnnnnnnnnnnnnnnnnnnnnnnnnnnnnnnnnnnnnnnnnnnnnnnnnnnnnnnnnnnnnnnnnnnnnnnnnnnnnnnnnnnnnnnnnnnnnnnnnnnnnnnnnnnnnnnnnnnnnnnnnnnnnnnnnnnnnnnnnnnnnnnnnnnnnnnnnnnnnnnnnnnnnnnnnnnnnnnnnnnnnnnnnnnnnnnnnnnnnnnnnnnnnnnnnnnnnnnnnnnnnnnnnnnnnnnnnnnnnnnnnnnnnnnnnnnnnnnnnnnnnnnnnnnnnnnnnnnnnnnnnnnnnnnnnnnnnnnnnnnnnnnnnnnnnnnnnnnnnnnnnnnnnnnnnnnnnnnnnnnnnnnnnnnnnnnnnnnnnnnnnnnnnnnnnnnnnnnnnnnnnnnnnnnnnnnnnnnnnnnnnnnnnnnnnnnnnnnnnnnnnnnnnnnnnnnnnnnnnnnnnnnnnnnnnnnnnnnnnnnnnnnnnnnnnnnnnnnnnnnnnnnnnnnnnnnnnnnnnnnnnnnnnnnnnnnnnnnnnnnnnnnnnnnnnnnnnnnnnnnnnnnnnnnnnnnnnnnnnnnnnnnnnnnnnnnnnnnnnnnnnnnnnnnnnnnnnnnnnnnnnnnnnnnnnnnnnnnnnnnnnnnnnnnnnnnnnnnnnnnnnnnnnnnnnnnnnnnnnnnnnnnnnnnnnnnnnnnnnnnnnnnnnnnnnnnnnnnnnnnnnnnnnnnnnnnnnnnnnnnnnnnnnnnnnnnnnnnnnnnnnnnnnnnnnnnnnnnnnnnnnnnnnnnnnnnnnnnnnnnnnnnnnnnnnnnnnnnnnnnnnnnnnnnnnnnnnnnnnnnnnnnnnnnnnnnnnnnnnnnnnnnnnnnnnnnnnnnnnnnnnnnnnnnnnnnnnnnnnnnnnnnnnnnnnnnnnnnnnnnnnnnnnnnnnnnnnnnnnnnnnnnnnnnnnnnnnnnnnnnnnnnnnnnnnnnnnnnnnnnnnnnnnnnnnnnnnnnnnnnnnnnnnnnnnnnnnnnnnnnnnnnnnnnnnnnnnnnnnnnnnnnnnnnnnnnnnnnnnnnnnnnnnnnnnnnnnnnnnnnnnnnnnnnnnnnnnnnnnnnnnnnnnnnnnnnnnnnnnnnnnnnnnnnnnnnnnnnnnnnnnnnnnnnnnnnnnnnnnnnnnnnnnnnnnnnnnnnnnnnnnnnnnnnnnnnnnnnnnnnnnnnnnnnnnnnnnnnnnnnnnnnnnnnnnnnnnnnnnnnnnnnnnnnnnnnnnnnnnnnnnnnnnnnnnnnnnnnnnnnnnnnnnnnnnnnnnnnnnnnnnnnnnnnnnnnnnnnnnnnnnnnnnnnnnnnnnnnnnnnnnnnnnnnnnnnnnnnnnnnnnnnnnnnnnnnnnnnnnnnnnnnnnnnnnnnnnnnnnnnnnnnnnnnnnnnnnnnnnnnnnnnnnnnnnnnnnnnnnnnnnnnnnnnnnnnnnnnnnnnnnnnnnnnnnnnnnnnnnnnnnnnnnnnnnnnnnnnnnnnnnnnnnnnnnnnnnnnnnnnnnnnnnnnnnnnnnnnnnnnnnnnnnnnnnnnnnnnnnnnnnnnnnnnnnnnnnnnnnnnnnnnnnnnnnnnnnnnnnnnnnnnnnnnnnnnnnnnnnnnnnnnnnnnnnnnnnnnnnnnnnnnnnnnnnnnnnnnnnnnnnnnnnnnnnnnnnnnnnnnnnnnnnnnnnnnnnnnnnnnnnnnnnnnnnnnnnnnnnnnnnnnnnnnnnnnnnnnnnnnnnnnnnnnnnnnnnnnnnnnnnnnnnnnnnnnnnnnnnnnnnnnnnnnnnnnnnnnnnnnnnnnnnnnnnnnnnnnnnnnnnnnnnnnnnnnnnnnnnnnnnnnnnnnnnnnnnnnnnnnnnnnnnnnnnnnnnnnnnnnnnnnnnnnnnnnnnnnnnnnnnnnnnnnnnnnnnnnnnnnnnnnnnnnnnnnnnnnnnnnnnnnnnnnnnnnnnnnnnnnnnnnnnnnnnnnnnnnnnnnnnnnnnnnnnnnnnnnnnnnnnnnnnnnnnnnnnnnnnnnnnnnnnnnnnnnnnnnnnnnnnnnnnnnnnnnnnnnnnnnnnnnnnnnnnnnnnnnnnnnnnnnnnnnnnnnnnnnnnnnnnnnnnnnnnnnnnnnnnnnnnnnnnnnnnnnnnnnnnnnnnnnnnnnnnnnnnnnnnnnnnnnnnnnnnnnnnnnnnnnnnnnnnnnnnnnnnnnnnnnnnnnnnnnnnnnnnnnnnnnnnnnnnnnnnnnnnnnnnnnnnnnnnnnnnnnnnnnnnnnnnnnnnnnnnnnnnnnnnnnnnnnnnnnnnnnnnnnnnnnnnnnnnnnnnnnnnnnnnnnnnnnnnnnnnnnnnnnnnnnnnnnnnnnnnnnnnnnnnnnnnnnnnnnnnnnnnnnnnnnnnnnnnnnnnnnnnnnnnnnnnnnnnnnnnnnnnnnnnnnnnnnnnnnnnnnnnnnnnnnnnnnnnnnnnnnnnnnnnnnnnnnnnnnnnnnnnnnnnnnnnnnnnnnnnnnnnnnnnnnnnnnnnnnnnnnnnnnnnnnnnnnnnnnnnnnnnnnnnnnnnnnnnnnnnnnnnnnnnnnnnnnnnnnnnnnnnnnnnnnnnnnnnnnnnnnnnnnnnnnnnnnnnnnnnnnnnnnnnnnnnnnnnnnnnnnnnnnnnnnnnnnnnnnnnnnnnnnnnnnnnnnnnnnnnnnnnnnnnnnnnnnnnnnnnnnnnnnnnnnnnnnnnnnnnnnnnnnnnnnnnnnnnnnnnnnnnnnnnnnnnnnnnnnnnnnnnnnnnnnnnnnnnnnnnnnnnnnnnnnnnnnnnnnnnnnnnnnnnnnnnnnnnnnnnnnnnnnnnnnnnnnnnnnnnnnnnnnnnnnnnnnnnnnnnnnnnnnnnnnnnnnnnnnnnnnnnnnnnnnnnnnnnnnnnnnnnnnnnnnnnnnnnnnnnnnnnnnnnnnnnnnnnnnnnnnnnnnnnnnnnnnnnnnnnnnnnnnnnnnnnnnnnnnnnnnnnnnnnnnnnnnnnnnnnnnnnnnnnnnnnnnnnnnnnnnnnnnnnnnnnnnnnnnnnnnnnnnnnnnnnnnnnnnnnnnnnnnnnnnnnnnnnnnnnnnnnnnnnnnnnnnnnnnnnnnnnnnnnnnnnnnnnnnnnnnnnnnnnnnnnnnnnnnnnnnnnnnnnnnnnnnnnnnnnnnnnnnnnnnnnnnnnnnnnnnnnnnnnnnnnnnnnnnnnnnnnnnnnnnnnnnnnnnnnnnnnnnnnnnnnnnnnnnnnnnnnnnnnnnnnnnnnnnnnnnnnnnnnnnnnnnnnnnnnnnnnnnnnnnnnnnnnnnnnnnnnnnnnnnnnnnnnnnnnnnnnnnnnnnnnnnnnnnnnnnnnnnnnnnnnnnnnnnnnnnnnnnnnnnnnnnnnnnnnnnnnnnnnnnnnnnnnnnnnnnnnnnnnnnnnnnnnnnnnnnnnnnnnnnnnnnnnnnnnnnnnnnnnnnnnnnnnnnnnnnnnnnnnnnnnnnnnnnnnnnnnnnnnnnnnnnnnnnnnnnnnnnnnnnnnnnnnnnnnnnnnnnnnnnnnnnnnnnnnnnnnnnnnnnnnnnnnnnnnnnnnnnnnnnnnnnnnnnnnnnnnnnnnnnnnnnnnnnnnnnnnnnnnnnnnnnnnnnnnnnnnnnnnnnnnnnnnnnnnnnnnnnnnnnnnnnnnnnnnnnnnnnnnnnnnnnnnnnnnnnnnnnnnnnnnnnnnnnnnnnnnnnnnnnnnnnnnnnnnnnnnnnnnnnnnnnnnnnnnnnnnnnnnnnnnnnnnnnnnnnnnnnnnnnnnnnnnnnnnnnnnnnnnnnnnnnnnnnnnnnnnnnnnnnnnnnnnnnnnnnnnnnnnnnnnnnnnnnnnnnnnnnnnnnnnnnnnnnnnnnnnnnnnnnnnnnnnnnnnnnnnnnnnnnnnnnnnnnnnnnnnnnnnnnnnnnnnnnnnnnnnnnnnnnnnnnnnnnnnnnnnnnnnnnnnnnnnnnnnnnnnnnnnnnnnnnnnnnnnnnnnnnnnnnnnnnnnnnnnnnnnnnnnnnnnnnnnnnnnnnnnnnnnnnnnnnnnnnnnnnnnnnnnnnnnnnnnnnnnnnnnnnnnnnnnnnnnnnnnnnnnnnnnnnnnnnnnnnnnnnnnnnnnnnnnnnnnnnnnnnnnnnnnnnnnnnnnnnnnnnnnnnnnnnnnnnnnnnnnnnnnnnnnnnnnnnnnnnnnnnnnnnnnnnnnnnnnnnnnnnnnnnnnnnnnnnnnnnnnnnnnnnnnnnnnnnnnnnnnnnnnnnnnnnnnnnnnnnnnnnnnnnnnnnnnnnnnnnnnnnnnnnnnnnnnnnnnnnnnnnnnnnnnnnnnnnnnnnnnnnnnnnnnnnnnnnnnnnnnnnnnnnnnnnnnnnnnnnnnnnnnnnnnnnnnnnnnnnnnnnnnnnnnnnnnnnnnnnnnnnnnnnnnnnnnnnnnnnnnnnnnnnnnnnnnnnnnnnnnnnnnnnnnnnnnnnnnnnnnnnnnnnnnnnnnnnnnnnnnnnnnnnnnnnnnnnnnnnnnnnnnnnnnnnnnnnnnnnnnnnnnnnnnnnnnnnnnnnnnnnnnnnnnnnnnnnnnnnnnnnnnnnnnnnnnnnnnnnnnnnnnnnnnnnnnnnnnnnnnnnnnnnnnnnnnnnnnnnnnnnnnnnnnnnnnnnnnnnnnnnnnnnnnnnnnnnnnnnnnnnnnnnnnnnnnnnnnnnnnnnnnnnnnnnnnnnnnnnnnnnnnnnnnnnnnnnnnnnnnnnnnnnnnnnnnnnnnnnnnnnnnnnnnnnnnnnnnnnnnnnnnnnnnnnnnnnnnnnnnnnnnnnnnnnnnnnnnnnnnnnnnnnnnnnnnnnnnnnnnnnnnnnnnnnnnnnnnnnnnnnnnnnnnnnnnnnnnnnnnnnnnnnnnnnnnnnnnnnnnnnnnnnnnnnnnnnnnnnnnnnnnnnnnnnnnnnnnnnnnnnnnnnnnnnnnnnnnnnnnnnnnnnnnnnnnnnnnnnnnnnnnnnnnnnnnnnnnnnnnnnnnnnnnnnnnnnnnnnnnnnnnnnnnnnnnnnnnnnnnnnnnnnnnnnnnnnnnnnnnnnnnnnnnnnnnnnnnnnnnnnnnnnnnnnnnnnnnnnnnnnnnnnnnnnnnnnnnnnnnnnnnnnnnnnnnnnnnnnnnnnnnnnnnnnnnnnnnnnnnnnnnnnnnnnnnnnnnnnnnnnnnnnnnnnnnnnnnnnnnnnnnnnnnnnnnnnnnnnnnnnnnnnnnnnnnnnnnnnnnnnnnnnnnnnnnnnnnnnnnnnnnnnnnnnnnnnnnnnnnnnnnnnnnnnnnnnnnnnnnnnnnnnnnnnnnnnnnnnnnnnnnnnnnnnnnnnnnnnnnnnnnnnnnnnnnnnnnnnnnnnnnnnnnnnnnnnnnnnnnnnnnnnnnnnnnnnnnnnnnnnnnnnnnnnnnnnnnnnnnnnnnnnnnnnnnnnnnnnnnnnnnnnnnnnnnnnnnnnnnnnnnnnnnnnnnnnnnnnnnnnnnnnnnnnnnnnnnnnnnnnnnnnnnnnnnnnnnnnnnnnnnnnnnnnnnnnnnnnnnnnnnnnnnnnnnnnnnnnnnnnnnnnnnnnnnnnnnnnnnnnnnnnnnnnnnnnnnnnnnnnnnnnnnnnnnnnnnnnnnnnnnnnnnnnnnnnnnnnnnnnnnnnnnnnnnnnnnnnnnnnnnnnnnnnnnnnnnnnnnnnnnnnnnnnnnnnnnnnnnnnnnnnnnnnnnnnnnnnnnnnnnnnnnnnnnnnnnnnnnnnnnnnnnnnnnnnnnnnnnnnnnnnnnnnnnnnnnnnnnnnnnnnnnnnnnnnnnnnnnnnnnnnnnnnnnnnnnnnnnnnnnnnnnnnnnnnnnnnnnnnnnnnnnnnnnnnnnnnnnnnnnnnnnnnnnnnnnnnnnnnnnnnnnnnnnnnnnnnnnnnnnnnnnnnnnnnnnnnnnnnnnnnnnnnnnnnnnnnnnnnnnnnnnnnnnnnnnnnnnnnnnnnnnnnnnnnnnnnnnnnnnnnnnnnnnnnnnnnnnnnnnnnnnnnnnnnnnnnnnnnnnnnnnnnnnnnnnnnnnnnnnnnnnnnnnnnnnnnnnnnnnnnnnnnnnnnnnnnnnnnnnnnnnnnnnnnnnnnnnnnnnnnnnnnnnnnnnnnnnnnnnnnnnnnnnnnnnnnnnnnnnnnnnnnnnnnnnnnnnnnnnnnnnnnnnnnnnnnnnnnnnnnnnnnnnnnnnnnnnnnnnnnnnnnnnnnnnnnnnnnnnnnnnnnnnnnnnnnnnnnnnnnnnnnnnnnnnnnnnnnnnnnnnnnnnnnnnnnnnnnnnnnnnnnnnnnnnnnnnnnnnnnnnnnnnnnnnnnnnnnnnnnnnnnnnnnnnnnnnnnnnnnnnnnnnnnnnnnnnnnnnnnnnnnnnnnnnnnnnnnnnnnnnnnnnnnnnnnnnnnnnnnnnnnnnnnnnnnnnnnnnnnnnnnnnnnnnnnnnnnnnnnnnnnnnnnnnnnnnnnnnnnnnnnnnnnnnnnnnnnnnnnnnnnnnnnnnnnnnnnnnnnnnnnnnnnnnnnnnnnnnnnnnnnnnnnnnnnnnnnnnnnnnnnnnnnnnnnnnnnnnnnnnnnnnnnnnnnnnnnnnnnnnnnnnnnnnnnnnnnnnnnnnnnnnnnnnnnnnnnnnnnnnnnnnnnnnnnnnnnnnnnnnnnnnnnnnnnnnnnnnnnnnnnnnnnnnnnnnnnnnnnnnnnnnnnnnnnnnnnnnnnnnnnnnnnnnnnnnnnnnnnnnnnnnnnnnnnnnnnnnnnnnnnnnnnnnnnnnnnnnnnnnnnnnnnnnnnnnnnnnnnnnnnnnnnnnnnnnnnnnnnnnnnnnnnnnnnnnnnnnnnnnnnnnnnnnnnnnnnnnnnnnnnnnnnnnnnnnnnnnnnnnnnnnnnnnnnnnnnnnnnnnnnnnnnnnnnnnnnnnnnnnnnnnnnnnnnnnnnnnnnnnnnnnnnnnnnnnnnnnnnnnnnnnnnnnnnnnnnnnnnnnnnnnnnnnnnnnnnnnnnnnnnnnnnnnnnnnnnnnnnnnnnnnnnnnnnnnnnnnnnnnnnnnnnnnnnnnnnnnnnnnnnnnnnnnnnnnnnnnnnnnnnnnnnnnnnnnnnnnnnnnnnnnnnnnnnnnnnnnnnnnnnnnnnnnnnnnnnnnnnnnnnnnnnnnnnnnnnnnnnnnnnnnnnnnnnnnnnnnnnnnnnnnnnnnnnnnnnnnnnnnnnnnnnnnnnnnnnnnnnnnnnnnnnnnnnnnnnnnnnnnnnnnnnnnnnnnnnnnnnnnnnnnnnnnnnnnnnnnnnnnnnnnnnnnnnnnnnnnnnnnnnnnnnnnnnnnnnnnnnnnnnnnnnnnnnnnnnnnnnnnnnnnnncggcgggtcccgcagaccactccgcggtctccgagtttgtgcagcagcgtcaggcaatcacacgtttcgtgcgggacgcactgcaagctgaagtggacaagcataacgaaaatgcagacaagcgtgggcgcaaaaacaaaaattcatttcgcacgggtgtgcggtggagtccctcagaaaaaaactaataaactcccacacgtgtcctgccacgcaactacgggggggggggttacccctgcaagccaaatacccaaagacaacgagaactagtcccgagatctctaggcctcaccttgtgtacccttgtagcaagactcggatctttatctagcgtaattcctagaagacgtgtaatatgaaggggtggatatggggttccttacactcgcaggcagagacttaggttaactctgtcgcggatgcacttgtacagcgaggtaactcttctcactgtacgacaacttgttgtacaatatgtacgagatctactggagatctcctgccgcagctagtctgcgggtccaaaccaaagtgcgagacgcacaccaataccttactaaaccgtttagagtgtcctactgtcgaacactgagagctgatctcctgagtccagacaatgcaacacactacgttactagaaggttaccggggaggccaaatcaatccagaaccccgagtacactccgcaagtaggtaggaaacagtcacagtacacacgtaggcgctaaccgcacaacacaaagactaatatgaagaagtaccttgtctcgtcgttggaaattctgaactgaactgcctatctaccggcggctcatctgccggccaaccaaccaaccggtatgctgcacgcctttacctcatgacgtcatctgctgtctccatgcgatgtcatcgtccttgttacgggcctccccgttctggatctccgtaaatacgccatcgggtttcgtaatcagtcgccggccttctatacgggacgccgagctagggtgtcccacaattcaagtagctcactctcgggtcaccttcgggtaacctccgggtccatcgcctcacaatccttcaacccgcattacgacaggtgaccatgtgctactgtctaccgaaggcatccgctcctccgccgtgaccaacctcggtgccaacaagctcgcgccgcgcttcatcggcccgttcaagatgatcaaggttctcggcgacgcgtacacactggacatcccgtcgtcgctgcgtcttcacccgaattctacgtcgggcgcctcaagcgatatcatcctgccgatattccgacctctgatcaccaggattcactggcgggtaatgtacccgacgctactcgcgacgccaacacccatcacccaagcctgtaccgtcgcgatggccctcctccgattgtcgactcggcgggtgaagcgcgctggattgtggaccgcatcgctcaccacgaggacccatgtcgtgcaaacgggcgtgggcgtaatccagtccgagctcctcgtgcgatcccagccgcgcgacgttaccgagtacgctggcttgggtttccacctgacgaggacacgtgggagacgcgtgcacctcttcttcgggatgtccccgatgttgttcgtgactatgaggcgaaggtcgctgctgctgacgagaccacggagctccccgcggaagctgaagccttaagtgagcgtgatgatggagctcgcggtggcgttcatcgcgaagactaagaagaaaatccgacgacgaccgccggactcgaaccggtgacctccgccttggtggcgcagcgttcgaccactgcgctagctaggcttcgagtcccctcgacgacgctctcggcctggtcaagtttggagcgactgcgcgtggcaagtggcaaaaaggattcgcgtgaggcttgaacccacgcgtcacagctcagctcggtgagcgcttgcccactacgccgcaccaccgatggtcgcaggtgtcgaaggtgtccaagctggtctcgctgccacgtcggttcgggtcgacggttacgcgaccctttgtcggggttacttcgaagggtcgtctcgaagagtcgcgccacgctgatcgccatcctgtgtctcgacactcaccgggtctccgctccgtgggcatcacagttgcgcttgtcgtcaagcgttggtgtcgctccacatgctgcgtcgtttccacgtccaccgtcccttcgggtgtccagggatgtccgcagccacttggggcactgcgcattgcatcggcgtgtgcgccgacgagatgtcttggtgtgtgcacacttgctgcacctgcgtcgtcctgtgtcaatcggtagcgcgagcgccgttcctccgccgcctcggtcgtccatggtgttcttcgggtgttctttcggaaatgtgtcttttgcgcttacgttgcgtaagcgcaactttgagaggggggggtgatgtaatgggccccagttacataagtaggtagagtgacagtacataaagtagttaagtcagtacacggctagcgtgtactgacggtcatcgtgattggctgaattgggggagccagaccccagttcagccaatcagacgttgacctgcatttgagcggctcacacgagaccaggggtagccgtcctggtcctaacataaaacagagttgattttacccaagtctgactgttggtctcattaaatccgagtcttaactaagcttcctcactgctacgtgtaagctagtaacggacacacacctggcccgttacacacaccgccgatacgtattgtagctacagtaatatgcggaggccgtggacaagcagggcgtcgtggtgactcacagccagtgcacttgaagatcgtgcgcctcaggaagacgagtacgacgacgataccagtgcctgtagcgtcgaagtcctttgtcgatcgggccaagtaataacgtacctaacctgtttcatttatttcgttgagtcaatacgtttaaagctccgtaagatttgatttgacttgattattgtatataccttcagtactttaatcgttgaaccctttcttattgccgctactctctgtactacctccactcggaaataaaaggcagtttcaaactatttccaatttcgcaagttttatatcctcctcaagaagatacctcgctaaacaaatgtgtatccgttcgcatcatttcgaagagggatgggtggagaggtcctgattcgaatctcccgcccagttcacttcgcaagttcaagggagagcaacaagctgctgcacgatcgtagagcatgaagtcaaggctcaagccccaagccgcgtgtgtgaggctcctcagtgagtacttgattgggtagactcgcgcggaacgctcgtgtgctaacggtcgtgctgtttgtgcgtatgtatgtccagcatgatcgcaggctaaggaagaccccaaggcaggaggtaagcgcgcgacatatgtcggtcaagtggagagcgcgtctagacatccagaacgcgactatgcttgtaatgggcctactactacggcttacgcgtatgcgcacgtgtatgaggaagcgtaggtttcttttacttgagttaagtatactcgagatccacgagtatattttaaacaagataaagaccccaagtagcgtgttttggtaaaagatgagaactgctatttgtgttttatgtttctgacttcctctaaatgtaatattctaaactaggaatctgccaacggctggagggcagaactatgcatgtcactcattggctaaaagatgctgctctcaaccaataggaatcctaagtctctatggaccacccgtcgtggtgatcctaaatgtatgtagcctttggtgtgtctacaccaaggacgagaaagtctttcgaacctctaacagacgccgtgtctgttagagttacaagtgacagtagccacttgtgcgtgtaaccccgttacaatgctactgtagtgaacgcgcttgccaggctgagcatcgagtagatcctggcgaccccctataagaatgaagctctgctcacagtcctacaaacatgctggaggcggaacaagtacgctgggcagcaggcggtgggccatgtacttcgcagttgatctgcttgtctcttcagcccggcgaattgcggtgcctggatgtggcggcctttaatgcggcattgaatgcggtggcctcgatgcgcacctcggcttgactctcgttacctattctgattcaaaaattggtcgtgctctaattttgctctctttgcacagcttataattcacaaaaaacgaggcggagctatgcgcaatttttttttgaaactgcccttattttccgaacggaggtagtactttcatacctcagcgctgttaataatcaaatacaagaaagctattagctgcaacagcgccctgccaagcacttaccttcgtgctgtaacttcgtcctggtgttgcgtcttcgggtcgggtgtgagaatgggaaatggttcgaatgaaacttgatgatgcgattgatgcttcctcaccgatagagaccgactagataattatttaatttcaatatatgatggatacttaaacaggtgcgatacacgcacggcttcatgcgacaccgatttaatcctgtaccggctgcgtagcagcataccttacggtacacatgctatctcagtaaaaaatgtgatggtattcgcgagttataactgtgcaacttagtaatagatattacatgtacagacgatcctctttgtagtgatactattactataaaaagtggccgaggctagcctcggataaaaagtggtctcccgaggctatcacagtgatagcctcgggagactactttttatcactatacagaggactcactatctagatctgtaccatattggcggtacattatcgttcaaggtactaaagagtagtgataatgcgtacagtaatgtgcgtgaataccgaacgcctgatatagttgtatcttaacttgttcatgagcctcatcttgaagagccttcttcttcaagtgaattaactgagctgacactcatacttctggattgagcatcagatgctacgtccgctaaactatcttctaacgaaaaaactcgatcagtcgtcgctgttgcaggtgcgggtgactctacccccgccgtgttcgtagaaaatgtaactgattcaacggtcttatttggcgggatagtagcgtctgtctgagcgcatgaagtcgatcgtgtcggaaccatggtaaggtgattactctgaagtgccgtcgctaagtccgcaggcgagtgccaacgcgcgagtgtcctacccacttcaacatcaagcacccaacttcaacaaaagtgcatagtttacgaatgaaaaagtggccactcgataattaattttgataccacatttgtatttgctactatgcacattgagcgactcgagtattcacttttagcgtgccaactagccactatgaagtggctagtcaataattcgccctgggttggcgtttgagtttttggctagctacttgttgcgtctcgactagccactagtagctagttttcatgcaacgagtggctagtcggaaccttagtcacaaaagtggctagtcgaaaattataatgtggctagttgaaaaatcgcacccattactctgaacatcagcgctccataatgcgtcctttattgagggttgctggtcttgggtactgtgtaccagttgtacccattaaccggttaacccgaaccggtccaatccgaacccacgttgattatggtgattacggtaagttgtttacgccaccgatgattatacgagtaggatgattggatgaacaccggtgagtgatggttgattagatgcactaggtgataggacgcagggtcgcgtgtctataacagtagggtgtaagctccaacaattcaatcactttcgaatcttcattctacccctcaagtgccttcgctccggtcccgccgtctgcgacgtccctccctccgcttcgtccgagcttcgtgtccaagatccataccttccatcaggttatgagcccaagcaccatgtcctctgcccaagacgcctcgaccaaggtctccattgacaagttcaacggggacaactacgcgacgtggaaccgctacatgcgtggcgtgttcctgaccaagtcgacgtggcatgtcgtgaaccgcgagacgacgccgagcttcacggactcgcgggccaaggacgactacgtcaagtcgagcaacatcgcgttcggactgatgttgctccacatggacgcggactaccaccatgtggtcgacgactgcgaggaagcgtgggttgcgtggacgcgcctgaagacgctgtacggtggttcgcagaaggctggacgcatctacctgaagcgccaactcttcagcatggagatgtcggaaggcggcaacgtcttgcatcattgcaacgaggtcctcaaccattgagggttgctggtcttgggtactgtgtaccagttgtacccattaaccggttagcccgaaccggtccaatccgaacccacgttgattatggtgattacggtaagttgtttacgccaccgatgattagacgagtaggatgattggatgaacaccggtgagtgatggttgattagatgcactaggtgataggacgcagggtcgcgtgtctataacagtagggtgtaagctccaacaattcaatcactttcgaatcttcattctacccctcaagtgccttcgctccggtcccgccgtctgcgacgtccctccctccgcttcgtccgagcttcgtgtccaagatccataccttccatcaggttatgagcccaagcaccatgtcctctgcccaagacgcctcgaccaaggtctccattgacaagttcaacggggacaactacgcgacgtggaaccgctacatgcgtggcgtgttcctgaccaagtcgacgtggcatgtcgtgaaccgcgagacgacgccgagcttcacggactcgcgggccaaggacgactacgtcaagtcgagcaacatcgcgttcggactgatgttgctccacatggacgcggactaccaccatgtggtcgacgactgcgaggaagcgtgggttgcgtggacgcgcctgaagacgctgtacggtggttcgcagaaggctggacgcatctacctgaagcgccaactcttcagcatggagatgtcggaaggcggcaacgtcttgcatcattgcaacgaggtcctcaactattgagggttgctggtcttgggtactgtgtaccagttgtacccattaaccggttaacccgaaccggtccaatccgaacccacgttgataatggtgattacggtaagttgtttacgccaccgatgattagacgagtaggatgattggatgaacaccggtgagtgatggttgattagatgcactaggtgataggacgcagggtcgcgtgtctataacagtagggtgtaagctccaacaattcaatcactttcgaatcttcattctacccctcaagtgccttcgctccggtcccgccgtctgcgacgtccctccctccgcttcgtccgagcttcgtgtccaagatccataccttccatcaggttatgagcccaagcaccatgtcctctgcccaagacgcctcgaccaaggtctccattgacaagttcaacggggacaactacgcgacgtggaaccgctacatgcgtggcgtgttcctgaccaagtcgacgtggcatgtcgtgaaccgcgagacgacgccgagcttcacggactcgcgggccaaggacgactacgtcaagtcgagcaacatcgcgttcggactgatgttgctccacatggacgcggactaccaccatgtggtcgacgactgcgaggaagcgtgggttgcgtggacgcgcctgaagacgctgtacggtggttcgcagaaggctggacgcatctacctgaagcgccaactcttcagcatggagatgtcggaaggcggcaacgtcttgcatcattgcaacgaggtcctcaactattgagggttgctggtcttgggtactgtgtaccagttgtacccattaaccggttaacccgaaccggtccaatccgaacccacgttgattatggtgattacggtaagttgtttacgccaccgatgattatacgagtaggatgattggatgaacaccggtgagtgatggttgattagatgcactaggtgataggacgcagggtcgcgtgtctataacagtagggtgtaagctccaacaattcaatcactttcgaatcttcattctacccctcaagtgccttcgctccggtcccgccgtctgcgacgtccctccctccgcttcgtccgagcttcgtgtccaagatccataccttccatcaggttatgagcccaagcaccatgtcctctgcccaagacgcctcgaccaaggtctccattgacaagttcaacggggacaactacgcgacgtggaaccgctacatgcgtggcgtgttcctgaccaagtcgacgtggcatgtcgtgaaccgcgagacgacgccgagcttcacggactcgcgggccaaggacgactacgtcaagtcgagcaacatcgcgttcggactgatgttgctccacatggacgcggactaccaccatgtggtcgacgactgcgaggaagcgtgggttgcgtggacgcgcctgaagacgctgtacggtggttcgcagaaggctggacgcatctacctgaagcgccaactcttcagcatggagatgtcggaaggcggcaacgtcttgcatcattgcaacgaggtcctcaatgtcagcgccaagctcagcagcatcggcgccaagatggaggatgaggacgtggcgatctgcctgttgcgcagcctccccaagagctacgagaacgtcgtgctgaacttggagatgagcaacgctgaactacgatcgcaagacgtcgtgaaggtgctgacgaatgagcacatcaagagacaaggcgagaagacggcgacggtgaagacggagaatgcggccaaggcgttcaacaccgaccgagagtctcgccagtgtacgtactgcgggaaattggggcacacgattgacaagtgctggaccaagcagaaggacgagaatcggggcccaagacgcggcggcaatggcaatggccgtggacgcggggccaacaatgcccagtggaggaacgacgacgccagctacaactacgactacggctatgatcgagtggcgttcgcggtctcactggagtgtggcatttcgacgggcaagaatgtgtccgggttgtgggcggtcgacagcggcgcaacgcaccacatctgcaacgacaaggccaagttcgctcatttgattgagcggaatgaaggcgaactttcggtggccgacggcaacaaggcggccatcatgggtgtggggaccatcgtggaacgagtggttctgcccaacggcgacgagcgcgacatcgagatcaagaacgcgctgtacgtcccaagcatgagcaagaatctgctttcggtgccacagatcaacaagagtggtctgttccaagtcgtgttcgacagcaccaagatgcagattgcgcacaagggctccaagcaagtggtggcgacggcaaacctcgtggatggactctactggctccagacgcctcagcgatcggcgaatgcggcgaccagtgggaagacggtcgacttacacgcgcgtatgggtcacgctccggtggaggtgcttcgcaagatggtcgacaacaacatgatcaaggacgcgaaggcaccttccaagtcgagtggaccaagcgtgtgtcgcggctgccagcaagggaaaatggtccagaagccgttcccaagcaaccgtgacaagcgtcactacgacacgttcgagctgctccacttcgacgtgtgcggccccatggaagaagagtcactgggtggcagcaagtatctgctgctgatcgtggacgaagccagcggatgcatgaaggggttctgcctgcgtgccaagtcggagagcgaggactgcatcaagatgtacgtcacgaaggtgcagacgcagttcggcaagaaggtcaagtttgtgcggcacgacggagcccgtgagttcgcgaccaactcgctcaaggccttctacgaagtcgaaggcatcgagcagcaaaccacggttccgtacgcgcaccagaccaacggcacggcagaacgcgccatccggaccatcgtcacgattggccgcagcatgctgcatcacgccaagctggacaagagcttctgggctgaggcggccatgacagccatctacgtgaagaatcgtctgccatcacccaagatcgaacacaagactccgttcgagatcgtttacaagtccaagccgagtgtgaagcacatgcgtgtgttcggatgccagacgtacatcctgacgccgaaggaaagacggcgcaagtgggaccccaaggctcgcgccgggctgttcctcggctacgaagaagtgtccaaggcgtatcgagtttatgacatcgaggcggggcaggtggttatcagtcgcgatgtcaacttcgatgagtcgacctttggactttcgacgcatacttcggatgaagacgtcgatgatgctgtgctggacttggacgcgctggacctggacgacaacgatggaccgcgccaagcgagcttcaagcaggcggggaagcgcaagtaccgaccgagtggcgacgacaacactgccagaagatcgcgccccgttcgccaccgagctggcttagaagaagcaagtgcgccggacgtatcctcctcgcgccgagccgaccccgacgaagaagaaaagtctggggaccaagatgaagacgacgactcgacgcctccagtgttttggcgtgccagtgccaacgctgtggaagcagcagccgatctatcggagccgacgacgttccaagaggctgtgaacggtcctgatcaagtgcactggcgcaaagcgatccgcgcggagctcaagtcgatgcgactgcgtggtgtgtttcgagctgccaagttgcctaacggacaacgcgccatcgataccaagtgggtgttcaagatcaagcgcaaagcggacggctcgatcgagaagtacaaggcgcgcctcgtggccaagggcttcaagcagaagtacggcattgactacaccgagacgttctcgcccgtggtcaagtatgtgacgctgcgcatggtgatcgcgattgctaagtattttggctggcccctcgaccaactcgacgtggtgacagcattcctgtacgggataatgaaggaggtgatcttctgcgtggttccggaaggcgtcgaactggatggtgacttcgactgcctggaactggtgaaggccatctacggtctcaagcaagcttcgcgagtgtggaacgagaccttcgacaagttcgtgtgctccatcggcttccaagtgtcggccttcggtccgtgcctctacatcaaggtggtggacggtcactgcgtgcttgtactggtgtacgtggatgacgtactagttcgcccgagctgatcgcacgcacgaagaccgacctgaagacgcgcttcgagatgaccgacagcggcaagtgcgcgtttgttcttgggatcgagttggtggacggcccggacggcagcgtgaccatgtgccagcggcgatacgtggacgacatcctgaagcgcttcgccatggacgagtgcaaggccgtggtgagtccggtggacatgagcactcgactggttccaagcgacgcggcgaccaaggtgaacgctccgtttcgcgaagctgttggtgctctgatgcacctgatgaccgccacgcgcccagacatcgcgtacgccgttggctatgtatcgcgcttcatggagaacccccaagaggaacactgggttgcggtcaagcgtatctttcgctacctgcaaggcaccaagacgcatgggatctgcttcaagccgggcgacaagatcgactttcgtggctactcggacgcggactgggccggcgacctcgccgaccgcaagtccacttcaggctacacgttcatgctcatgagtgcgcctgtgagctggggaagcaagaagcaatgaagcggagtacatcgcgctcaatctggctatccaagaaggcaagtggattcatcgcctgctatgcgagattctggcggccgctaatgagactagacccgaactcatgatccgcgaagacaaccagtcgtgcatcaagatgacgaagaacccagtgaaccacggtcgcgccaagcacatcgacatcaagtaccaccacatccgcgatgaagtcaagcgcggcgaagtcaagctccagtactgcgagacttctgtgatgctagcggacatcatgacgaaggcgcttgcgggaccacgccacacggatctgacggtggctctcggcattcgtgggacttcgcattgagggggcgtattgagggttgctggtcttgggtattgtgtaccagttgtacccattaaccggttaacccgaaccggtccaatccgaacccacgttgattatggtgattacggtaagttgtttacgccaccgatgattagacgagtaggatgattggatgaacaccggtgagtgatggttgattagatgcactaggtgataggacgcagggtcgcgtgtctataacagtagggtgtaagctccaacaattcaatcactttcgaatcttcattctacccctcaagtgccttcgctccggtcccgccgtctgcgacgtccctccctccgcttcgtccgagcttcgtgtccaagatccataccttccatcagtcatcgccaagcaatggccctgtatcatagttttgggtcaacttgatatgatgacctagaatcgcagtttaaggtcatcgccaagcaatgaccctgtatcatagttttgggtcaaacttgatatgatgacctagagtttgcggtttaagtataaggtgacacttgctcgcggtttagtaccaagtcaatcaatagattccaataagaactaatcaatgaagtatatatataagtgcagtatctaaaccaattaaaatggctttctgtttgcatacccccaggatcttggcggcgcatgagtaggctggtacgtgttcatgtggttcatctcaacgtgctgtggcggaagtaaagtctggtttagcacatcttggtctagttccacgcgagcgtgagggcttgccccagtaaggttgaactccacagtggtagtgtcgaatcccccattcaccacaggcatggtaaaaaatgggagggacgaactactctggaggtagggtaccgggagtgtagggacagcggaagggtggtttagatcaactcgttctgcaaacgtcggcagacgtgcagtacccgaggcgccgtaattagccttgtgagatcgcgcgacgcggcgggattttcttaagctggctggttcccgaatccttggccgccaagtctggatacgattgcgataaatccaccagtgagcgtcgaaatgactcggtagaagcctagaagatccattggatttaagcatagcgatgagttcatgaacacacggcctcgcatgaacagtgcgaaaaattccagagcaagctcgatacggtttagctccacttatgatgtccatggcctctttccagagactgtgagtagcacgaagagcccaaacagtagtcacacgcgaaacctgtgtgtatctgtcatgctgaagtagatacggcagtatcgtggcatcacaagccgcacgttcgctcacaccacggtaatagccttctaaagacggtgtacaaatcaccgttgcagtcgtgcaactagcgtttacattgcgcatgcgttccttccactgccgaagtatcacgatagccgtagtgacggtggcggtttgtccagcaatgaacgcgtttggctttgtgtttccaccaatgttcatccaggtacgaagcaatcaccggtgagagtaagtgcaattgggctcgacgaaacttaaattcttgttctgtttccgattccacagtcttgtagaaataatccatgaagacttgagtctgccacgtgttttcgtatttatcccggccagggagaggattgagaacggcaacctgccccaaaacacttcgggttttttctagcacattccagttgaagtgccaacgacaaatcatggtcggaactaaggcgaaaaaaatggcgagagcattcaaacatgccaattcgcgatccgtcagtatcagggtacaccgtgctcttcaagcatagaacgaagcgtcttgagaaaccagctaaaatttacctccttctgacgagggaggaagcactacgctacaggcagtactgtgttcataccagtcatgtatatgatggaaggtatggatcttggacacgaagctcggacgaagcggagggagggacgtcgcagacggcgggaccggagcgaaggcacttgaggggtagaatgaagattcgaaagtgattgaattgttggagcttacaccctactgttatagacacgcgaccctgcgtcctatcacctagtgcatctaatcaaccatcactcaccggtgttcatccaatcatcctactcgtctaatcatcggtggcgtaaacaacttaccgtaatcaccataatcaacgtgggttcggattggaccggttcgggttaaccggttaatgggtacaactggtacacagtacccaagaccagcaaccctcaatacgccccctcaatgcgaagtcccacgaatgccgagagccaccgtcagatccgtgtggcgtggtcccgcaagcgccttcgtcatgatgtccgctagcatcacagaagtctcgcagtactggagcttgacttcgccgcgcttgacttcatcgcggatgtggtggtacttgatgtcgatgtgcttggcgcgaccgtggttcactgggttcttcgtcatcttgatgcacgactggttgtcttcgcggatcatgagttcgggtctagtctcattagcggccgccagaatctcgcatagcaggcgatgaatccacttgccttcttggatagccagactgagcgcgatgtactccgcttcattgcttcttgcttccccagctcacaggcgcactcatgagcatgaacgtgtagcctgaagtggacttgcggtcggcgaggtcgccggcccagtccgcgtccgagtagccacgaaagtcgatcttgtcgcccggcttgaagcagatcccatgcgtcttggtgccttgcaggtagcgaaagatacgcttgaccgcaacccagtgttcctcttgggggttctccatgaagcgcgatacatagccaacggcgtacgcgatgtctgggcgcgtggcggtcatcaggtgcatcagagcaccaacagcttcgcgaaacggagcgttcaccttggtcgccgcgtcgcttggaaccagtcgagtgctcatgtccaccggactcaccacggccttgcactcgtccatggcgaagcgcttcaggatgtcgtccacgtatcgccgctggcacatggtcacgctgccgtccgggccgtccaccaactcgatcccaagaacaaacgcgcacttgccgctgtcggtcatctcgaagcgcgtcttcaggtcggtcttcgtgcgtgcgatcagctcgggcgaactcccggtaatcagtacgtcatccacgtacaccagtacaagcacgcagtgaccgtccaccaccttgatgtagaggcacggatcgaaggccgacacttggaagccgatggagcacacgaactcgtcgaaggtctcgttccacactcgcgaagcttgcttgagaccgtagatggccttcaccagttccaggcagtcgaagtcaccatccagttcgacgccttccggaaccacgcagaagaccacctccttcattatcccgtacaggaatgctgtcaccacgtcgagttggtcgaggggccagccaaaatacttagcaatcgcgatcaccatgcgcagcgtcacatacttgaccacgggcgagaacgtctcggtgtagtcaatgccgtacttctgcttgaagcccttggccacgaggcgcgccttgtacttctcgatcgagccgtccgctttgcgcttgatcttgaacacccacttggtcgttgtccgttaggcaacttggcagctcgaaacacaccacgcagtcgcatcgacttgagctccgcgcggatcgctttgcgccagtgcacttgatcaggaccgttcacagcctcttggaacgtcgtcggctccgatagatcggctgctgcttccacagcgttggcactggcacgccaaaacactggaggcgtcgagtcgtcgtcttcatcttggtccccagacttttcttcttcgtcggggtcggctcggcgcgaggaggatacgtccggcgcacttgcttcttctaagccagctcggtggcgaacggggcgcgatcttctggcagtgttgtcgtcgccactcggtcggtacttgcgcttccccgcctgcttgaagctcgtttggcgcggtccatcgttgtcgtccaggtccagcgcgtccaagtccagcacagcatcatcgacgtcttcatccgaagtatgcgtcgaaagtccaaaggtcgactcatcgaagttgacatcgcgactgataaccacctgccccgcctcgatgtcataaactcgatacgccttggacacttcttcgtagccgaggaacagcccggcgcgagccttggggtcccacttgcgccgtctttccttcggcgtcaggatgtacgtctggcatccgaacacacgcatgtgcttcacactcggcttggacttgtaaacgatctcgaacggagtcttgtgtacgatcttgggtgatggcagacgattcttcacgtagatggctgtcatggccgcctcagcccagaagctcttgtccagcttggcgtgatgcagcatgctgcggccaatcgtgacggtggtccggatggcgnnnnnnnnnnnnnnnnnnnnnnnnnnnnnnnnnnnnnnnnnnnnnnnnnnnnnnnnnnnnnnnnnnnnnnnnnnnnnnnnnnnnnnnnnnnnnnnnnnnnnnnnnnnnnnnnnnnnnnnnnnnnnnnnnnnnnnnnnnnnnnnnnnnnnnnnnnnnnnnnnnnnnnnnnnnnnnnnnnnnnnnnnnnnnnnnnnnnnnnnnnnnnnnnnnnnnnnnnnnnnnnnnnnnnncaacttaccgtaatcaccataatcaacgtgggttcggattggaccggttcgggctaaccggttaatgggtacaactggtacacagtacccaagaccagcaaccctcaatggttgaggacctcgttgcaatgatgcaagacgttgccgccttccgacatctccatgctgaagagttggcgcttcaggtagatgcgtccagccttctgcgaaccaccgtacagcgtcttcaggcgcgtccacgcaacccacgcttcctcgcagtcgtcgaccacatggtggtagtccgcgtccatgtggagcaacatcagtccgaacgcgatgttgctcgacttgacgtagtcgtccttggcccgcgagtccgtgaagctcggcgtcgtctcgcggttcacgacatgccacgtcgacttggtcaggaacacgccacgcatgtagcggttccacgtcgcgtagttgtccccgttgaacttgtcaatggagaccttggtcgaggcgtcttgggcagaggacatggtgcttgggctcataacctgatggaaggtatggatcttggacacgaagctcggacgaagcggagggagggacgtcgcagacggcgggaccggagcgaaggcacttgaggggtagaatgaagattcgaaagtgattgaattgttggagcttacaccctactgttatagacacgcgaccctgcgtcctatcacctagtgcatctaatcaaccatcactcaccggtgttcatccaatcatcctactcgtctaatcatcggtggcgtaaacaacttaccgtaatcaccataatcaacgtgggttcggattggaccggttcgggttaaccggttaatgggtacaactggtacacagtacccaagaccagcaaccttcaataggatatgacatttaaagtggtaaatcgtacttgttggttttgaacgtgccatccattatcaatacatcacaatgactgatgtgaagacgcagagtagccgggtgtgcccatcagagtcaatatccgagctatcagaatcgtcagaattataatccaaattgaaatcagggaagtcgtactcaaacagcaataaatctctttcagatcttgatatcccgaagtctgaacaaatcgaactgtcacgatatgcgaattcttcaattcctttgtcataaccatcgtacacgtagcagtcagatatgccgctgtggttcgccacggattcgacctcttcggaatcgatgagatagataaccttcccagtcgacccctgccaggtcgagatcaacagtagggtcacgttccaacgcgaatgcggctgaaaaaatgcctgacgactgagcaaaaggaaactgagctggggacttatcctcacctagatcagcgacacaagcagcagaagagatcacttgctcagaatcgcgtgggtcagcgccggcataggaggtggcttggtcaactacatggcctgtagaagaggtacgccgctggagatcgcgtgggtctgcgtctgcataggaggtggtttgataccaacccggcagacgcatgtccttgaacgaatgccaaatcgatagcttaaatggactttagtaggggcgaagtagctgaggaaggatggagattcgagggggggggtcagcggacgcactcttggaccaactttggaagtgaaggcagtgaaggcagtgctgtttcgtttgctattttgagaaagccaaagcggacgagtatactgagcctcaagggtgcattttggccattatcaataggtgaacagtagaaacaacgatgaattcaggttaaggcggaagcactacccgacactgcttaattctcgggctacaagttataagtgataagttaacccacagcagcgaaatcgggtcaatcgtgctgctgaccctaagcatacgaatcaggtcatgtgtagatgacccactcaagtcaatgtgggtcactggttttgggttttctaattgcctattttgaggcgttacctactgtcatctgtttacccaaatgccctggttgtaacgagggccctcccgatgagggccctccttagcaatccccggatccagtggtacctcaagtttcgcatggggagatggggcaatgtgcagatccagatggagagacggtgcagaaatccggtccgacaccagatccaacgactaccatagatccaaggcaccgggatgctgatgcggatgagcaagtctgcgaccatgtgagcggggatctgcacgccgaagatgttgaagcagagatggcggtgctacccgaagtcacctcgaccacagaccatgtgaccattgaagacatccaggtgggagatccagatgttaacacggtggaagagatcgatcgacttcgacggcggatctggaggcactggcacctgctgattggcaaaggcaacgcgctgccgcccgcggcacgaggagttgtgtgtgacattgatgtgggtgatgcaaaacccattgctcagcgggtgcgcaaggaagccgcgcagtaccatgagaagctgtcggatctaatcaagggtctacttggagccaagatcatcaagaatttgacttcactgtgggcatctccaattgtggcgatcatcaagaagaacggggtggacatacgtttgtgtattgattaccggctggttaacagtttgacccggctgatggtctacccgatgcccctgatcaacgacctgcttgaggatctggacaaggtgctttggtactgctctttggatatggccagtggattctgggtggtgacgatgacggatcgggctcgtgcgatctccgccttcatcaccccgttcggactgttcgagtggaaccggatgcccttcggattgaagaatgcaccccagatctatcagcggatgctagacaacgcattgtatggattcactcggatcccgcggctggaagatggatcgggatcagagcgcgaactcggatccaagcgtggatctggatcggaggcgttgaatctggatctgaagtcgggagaaccggaaggtccgggcaaaccatccgtactgggacgtcggtcgtatattgacgacatcttggtaaccggtggatcctgggatcacctgtgtgaacgtgtggacgcactactcgactcatgcgataaatagaatctctcgattagcgtggtgaagagtttctggggcaagagtaagatggaatacctcggtcatcgcgtgtcaaacgcaggactggaggcgaatcccaaggatctctcggcactaacggatccgaccttccaaggcacgcttagatccatgcagtcatacttgggtagtttgaattactacagtcggttcctggaggactacgcgatttacgctccgattctctacgagctacgtgaagtggactacgccgcgatgagcaacccggagaatcaaggccggatccaagcggtgatggcttccacgactccagatccaacggagcagacctcgtctgacatggtggatctagacttaccggacccgaactctggatccaccaaggctgtgaaacagaagacttcgaatcaggaggcgaacgatccaagcagtgtagatccgcgttggattagcgctcatcgggaatttgccaaactaaaagacaagatggcgacgactccgatcctccgacacttcgacgcagacctgttgccggtactggtcgtgtacgctagtgagtgggccatctcggctgccctgatgcaggagcacgacgggatccactatccagtaacgttcaccagccgcaccctgaagtcaaacgggcttaactgcggcgtggttgagaaggaggcgttggctctgttgcggatcctggatctgggttacaacatgttagttggacgctcgatccgagtcttgactagacattcgacgttggcctggttgttcagatccacgggcctacaagggcgattgggacagtgggcaacgacaacgcggaccgcgttgtcgtgcccaatgaccatgacctgcgactcaggatcatgtacgagtatcacgatgcaccgactgcggggcatccgggccgtgagaagacataccttcttctcacgcgatacttctactgggcccaccagtacaaatgggtgcgcaagtacgtccgtgcttgcgaggtttgtcaacgtgtgtagcctgcgcctttcgcgcaggctcccttgcagtcactgccgactccgtcggagtgttggcagtccatgtctttggactttgtgttcggtcttcccccggacagccaggggaacacgggcgttgtggtctttgttgaccgcttcagcaaggtggtacatcttgctgcggtacccgctgaagtgaccgcgaaaccgacggcgcgtctgttcgttgacatggtgttcaaacaccatggcatgccgatcgacattgtgtcggatcgagacccgcgcttcactgcacacctttggcaagaagtgtttacacttcttgagagtcaacgtcaactttcgatgtcgactgcgaaccatccgcagacggacgggcagaccgaacgcgtgaaccgcgtgctcgtagacgtgcttaagaactacgctcactcgttccaacactgaagcgagtgcctgccgatggcggaattcgccatcaacaaatcggtgcatgcctcgactgggcatacatcgttctacgtgaatgccatcaggcacccacgcctcccgagtctactcgggatagtggctccttccttaagtgggggaggatctacgactgcaacgcagcagccgcagaattccgctgacacttgcacagtgtcagccgcgactacgcgcaaaaagaacaagacgcacgcgtcaagagcaagaagaagaagaagaagaacgtgtctgtgaagggcacagacaaccgcagaggccgggcctactgctagaaacgagctgaacgagttcagctcggacgcaatcaacttcgtgcagcgcagacaagccgtcattcggtttgtccaagacgctattgcagcttctgtcgaccgacagaagctgaacgcagccaatgttggtaggggaaacactaatgaattcaagaagggttcattggttttgttagcaactcaaaacctgcctaaacatgcagtttccgacttcggggcatgcaagctcgctccgcgcttcatcgggccgttcacggtgttggcacgacatggcaacgcctacacgcaagacattccatctagcatgcgcctccatccgaccttttacgtcgggcggctgaagccataccggcagcacgagccacctagctcggctgaaccgaaacagaagactcggcggaagccgtcatcctcaccagcgcgaagtcgcgctggagcagcgggtcgagctaatggtccagctcggccggaacgatcgaggcggcctgggaggccgccgcaacctgaggatacttcagagcgccgaactcagcgctctggaactactccacgaccggaacttagtcgtggggagacgcgagatcagggtcaacaccaagttgaccatacacggggcgtgtttccaccaccaccgccgccaattcgtgacgcacacggctcaagtcgatggattattgagcggattgttggtcacagtatcccgagaatgaacaggcaaccggttcgttttcgtatccgttggagaggattccctcccaaccaagatacatgggagccgcggacgtcttgctcgaagacgtcccggacatggtgaaggcgtatgaagcccaccatgcgctacgcgctggaaagcaatacgagcgctgttgttaacaacagcgcccgaaggcacttcaagggcaggcagtgggtcctgcccccgcggcagcgacgcgcttcgcacgtttccgcggatgctactcagcagcagagaggttctccgctgatgcgccagcggtcttcaactttgacgcgctcgttccattacgagcgcgctctcttcagcgtcacgcattgaccaagcggtcaatggtggttgacgtgccgtgactcggcgcgtctaaccttgaggggggatggtgtaacagtgttacacgcgcaagtggctacagtcacctgtaactctaacagacacgacgtctgttagaggttcgaaagactttctcgaccttggtgtagatacaccaaatgctacatacatttacgaccaccacgacgggtggtccatagagacttaggattcctattggctgaaagcagcatcttttagccaatgagcgacatgcatagcattggaattctgccaaccagccgttggcagattcctatcttagaatattacatttagaggaagtcagaaacataaaacaaaaatagcagttctcatcttttaccaaaacacgctacttggagtctttatattgtttaaagtatactcgtggatctcgagtatacttaactcaagtaaaaacctacgcttcctcatacacgtgcgcatacgtgtaagccgtagtagtgagccaaggtaggcccattacagtagtcaatacagagtctgatgtcgaccccgttcttcttgacgatcaccacgatcggtgatgcccaaggggacgttgagatcttgatcatcttggtcgacaggagccccttgattagctgcttcagcttttcgcggtactgcggcgccgctttacggcaacgctgagcgactggcttcgcgtttccgacgtcaatgtcgcagatcgcaccttttgcggccggtggtaaggcattgccttttccaataagcaagtgcttccggcgccagatgatcttccgcagccggtcgatttcctccggcgtgttttcgccaggatcgccaacttggatatccgtgatcacgacttcgtcagtggtgaactccgggagcactgccatttaaccttcgacatcttccgcgtagagatcaccgccttccgtgatgcagacttcaggatcttccgggtcaactgcatttggacgtggatcagcttcaagatcacttcccgacgcgtgtttacgcgtctcgtgactgacgctggggctcgctggattttcgtccgtttcgacccgtcgatctcgattagacgcctgatttacgcctgtcgcaccaccgtaatcatgatgagacgcctaattnnnnnnnnnnnnnnnnnnnnnnnnnnnnnnnnnnnnnnnnnnnnnnnnnnnnnnnnnnnnnnnnnnnnnnnnnnnnnnnnnnnnnnnnnnnnnnnnnnnnnnnnnnnnnnnnnnnnnnnnnnnnnnnnnnnnnnnnnnnnnnnnnnnnnnnnnnnnnnnnnnnnnnnnnnnnnnnnnnnnnnnnnnnnnnnnnnnnnnnnnnnnnnnnnnnnnnnnnnnnnnnnnnnnnnnnnnnnnnnnnnnnnnnnnnnnnnnnnnnnnnnnnnnnnnnnnnnnnnnnnnnnnnnnnnnnnnnnnnnnnnnnnnnnnnnnnnnnnnnnnnnnnnnnnnnnnnnnnnnnnnnnnnnnnnnnnnnnnnnnnnnnnnnnnnnnnnnnnnnnnnnnnnnnnnnnnnnnnnnnnnnnnnnnnnnnnnnnnnnnnnnnnnnnnnnnnnnnnnnnnnnnnnnnnnnnnnnnnnnnnnnnnnnnnnnnnnnnnnnnnnnnnnnnnnnnnnnnnnnnnnnnnnnnnnnnnnnnnnnnnnnnnnnnnnnnnnnnnnnnnnnnnnnnnnnnnnnnnnnnnnnnnnnnnnnnnnnnnnnnnnnnnnnnnnnnnnnnnnnnnnnnnnnnnnnnnnnnnnnnnnnnnnnnnnnnnnnnnnnnnnnnnnnnnnnnnnnnnnnnnnnnnnnnnnnnnnnnnnnnnnnnnnnnnnnnnnnnnnnnnnnnnnnnnnnnnnnnnnnnnnnnnnnnnnnnnnnnnnnnnnnnnnnnnnnnnnnnnnnnnnnnnnnnnnnnnnnnnnnnnnnnnnnnnnnnnnnnnnnnnnnnnnnnnnnnnnnnnnnnnnnnnnnnnnnnnnnnnnnnnnnnnnnnnnnnnnnnnnnnnnnnnnnnnnnnnnnnnnnnnnnnnnnnnnnnnnnnnnnnnnnnnnnnnnnnnnnnnnnnnnnnnnnnnnnnnnnnnnnnnnnnnnnnnnnnnnnnnnnnnnnnnnnnnnnnnnnnnnnnnnnnnnnnnnnnnnnnnnnnnnnnnnnnnnnnnnnnnnnnnnnnnnnnnnnnnnnnnnnnnnnnnnnnnnnnnnnnnnnnnnnnnnnnnnnnnnnnnnnnnnnnnnnnnnnnnnnnnnnnnnnnnnnnnnnnnnnnnnnnnnnnnnnnnnnnnnnnnnnnnnnnnnnnnnnnnnnnnnnnnnnnnnnnnnnnnnnnnnnnnnnnnnnnnnnnnnnnnnnnnnnnnnnnnnnnnnnnnnnnnnnnnnnnnnnnnnnnnnnnnnnnnnnnnnnnnnnnnnnnnnnnnnnnnnnnnnnnnnnnnnnnnnnnnnnnnnnnnnnnnnnnnnnnnnnnnnnnnnnnnnnnnnnnnnnnnnnnnnnnnnnnnnnnnnnnnnnnnnnnnnnnnnnnnnnnnnnnnnnnnnnnnnnnnnnnnnnnnnnnnnnnnnnnnnnnnnnnnnnnnnnnnnnnnnnnnnnnnnnnnnnnnnnnnnnnnnnnnnnnnnnnnnnnnnnnnnnnnnnnnnnnnnnnnnnnnnnnnnnnnnnnnnnnnnnnnnnnnnnnnnnnnnnnnnnnnnnnnnnnnnnnnnnnnnnnnnnnnnnnnnnnnnnnnnnnnnnnnnnnnnnnnnnnnnnnnnnnnnnnnnnnnnnnnnnnnnnnnnnnnnnnnnnnnnnnnnnnnnnnnnnnnnnnnnnnnnnnnnnnnnnnnnnnnnnnnnnnnnnnnnnnnnnnnnnnnnnnnnnnnnnnnnnnnnnnnnnnnnnnnnnnnnnnnnnnnnnnnnnnnnnnnnnnnnnnnnnnnnnnnnnnnnnnnnnnnnnnnnnnnnnnnnnnnnnnnnnnnnnnnnnnnnnnnnnnnnnnnnnnnnnnnnnnnnnnnnnnnnnnnnnnnnnnnnnnnnnnnnnnnnnnnnnnnnnnnnnnnnnnnnnnnnnnnnnnnnnnnnnnnnnnnnnnnnnnnnnnnnnnnnnnnnnnnnnnnnnnnnnnnnnnnnnnnnnnnnnnnnnnnnnnnnnnnnnnnnnnnnnnnnnnnnnnnnnnnnnnnnnnnnnnnnnnnnnnnnnnnnnnnnnnnnnnnnnnnnnnnnnnnnnnnnnnnnnnnnnnnnnnnnnnnnnnnnnnnnnnnnnnnnnnnnnnnnnnnnnnnnnnnnnnnnnnnnnnnnnnnnnnnnnnnnnnnnnnnnnnnnnnnnnnnnnnnnnnnnnnnnnnnnnnnnnnnnnnnnnnnnnnnnnnnnnnnnnnnnnnnnnnnnnnnnnnnnnnnnnnnnnnnnnnnnnnnnnnnnnnnnnnnnnnnnnnnnnnnnnnnnnnnnnnnnnnnnnnnnnnnnnnnnnnnnnnnnnnnnnnnnnnnnnnnnnnnnnnnnnnnnnnnnnnnnnnnnnnnnnnnnnnnnnnnnnnnnnnnnnnnnnnnnnnnnnnnnnnnnnnnnnnnnnnnnnnnnnnnnnnnnnnnnnnnnnnnnnnnnnnnnnnnnnnnnnnnnnnnnnnnnnnnnnnnnnnnnnnnnnnnnnnnnnnnnnnnnnnnnnnnnnnnnnnnnnnnnnnnnnnnnnnnnnnnnnnnnnnnnnnnnnnnnnnnnnnnnnnnnnnnnnnnnnnnnnnnnnnnnnnnnnnnnnnnnnnnnnnnnnnnnnnnnnnnnnnnnnnnnnnnnnnnnnnnnnnnnnnnnnnnnnnnnnnnnnnnnnnnnnnnnnnnnnnnnnnnnnnnnnnnnnnnnnnnnnnnnnnnnnnnnnnnnnnnnnnnnnnnnnnnnnnnnnnnnnnnnnnnnnnnnnnnnnnnnnnnnnnnnnnnnnnnnnnnnnnnnnnnnnnnnnnnnnnnnnnnnnnnnnnnnnnnnnnnnnnnnnnnnnnnnnnnnnnnnnnnnnnnnnnnnnnnnnnnnnnnnnnnnnnnnnnnnnnnnnnnnnnnnnnnnnnnnnnnnnnnnnnnnnnnnnnnnnnnnnnnnnnnnnnnnnnnnnnnnnnnnnnnnnnnnnnnnnnnnnnnnnnnnnnnnnnnnnnnnnnnnnnnnnnnnnnnnnnnnnnnnnnnnnnnnnnnnnnnnnnnnnnnnnnnnnnnnnnnnnnnnnnnnnnnnnnnnnnnnnnnnnnnnnnnnnnnnnnnnnnnnnnnnnnnnnnnnnnnnnnnnnnnnnnnnnnnnnnnnnnnnnnnnnnnnnnnnnnnnnnnnnnnnnnnnnnnnnnnnnnnnnnnnnnnnnnnnnnnnnnnnnnnnnnnnnnnnnnnnnnnnnnnnnnnnnnnnnnnnnnnnnnnnnnnnnnnnnnnnnnnnnnnnnnnnnnnnnnnnnnnnnnnnnnnnnnnnnnnnnnnnnnnnnnnnnnnnnnnnnnnnnnnnnnnnnnnnnnnnnnnnnnnnnnnnnnnnnnnnnnnnnnnnnnnnnnnnnnnnnnnnnnnnnnnnnnnnnnnnnnnnnnnnnnnnnnnnnnnnnnnnnnnnnnnnnnnnnnnnnnnnnnnnnnnnnnnnnnnnnnnnnnnnnnnnnnnnnnnnnnnnnnnnnnnnnnnnnnnnnnnnnnnnnnnnnnnnnnnnnnnnnnnnnnnnnnnnnnnnnnnnnnnnnnnnnnnnnnnnnnnnnnnnnnnnnnnnnnnnnnnnnnnnnnnnnnnnnnnnnnnnnnnnnnnnnnnnnnnnnnnnnnnnnnnnnnnnnnnnnnnnnnnnnnnnnnnnnnnnnnnnnnnnnnnnnnnnnnnnnnnnnnnnnnnnnnnnnnnnnnnnnnnnnnnnnnnnnnnnnnnnnnnnnnnnnnnnnnnnnnnnnnnnnnnnnnnnnnnnnnnnnnnnnnnnnnnnnnnnnnnnnnnnnnnnnnnnnnnnnnnnnnnnnnnnnnnnnnnnnnnnnnnnnnnnnnnnnnnnnnnnnnnnnnnnnnnnnnnnnnnnnnnnnnnnnnnnnnnnnnnnnnnnnnnnnnnnnnnnnnnnnnnnnnnnnnnnnnnnnnnnnnnnnnnnnnnnnnnnnnnnnnnnnnnnnnnnnnnnnnnnnnnnnnnnnnnnnnnnnnnnnnnnnnnnnnnnnnnnnnnnnnnnnnnnnnnnnnnnnnnnnnnnnnnnnnnnnnnnnnnnnnnnnnnnnnnnnnnnnnnnnnnnnnnnnnnnnnnnnnnnnnnnnnnnnnnnnnnnnnnnnnnnnnnnnnnnnnnnnnnnnnnnnnnnnnnnnnnnnnnnnnnnnnnnnnnnnnnnnnnnnnnnnnnnnnnnnnnnnnnnnnnnnnnnnnnnnnnnnnnnnnnnnnnnnnnnnnnnnnnnnnnnnnnnnnnnnnnnnnnnnnnnnnnnnnnnnnnnnnnnnnnnnnnnnnnnnnnnnnnnnnnnnnnnnnnnnnnnnnnnnnnnnnnnnnnnnnnnnnnnnnnnnnnnnnnnnnnnnnnnnnnnnnnnnnnnnnnnnnnnnnnnnnnnnnnnnnnnnnnnnnnnnnnnnnnnnnnnnnnnnnnnnnnnnnnnnnnnnnnnnnnnnnnnnnnnnnnnnnnnnnnnnnnnnnnnnnnnnnnnnnnnnnnnnnnnnnnnnnnnnnnnnnnnnnnnnnnnnnnnnnnnnnnnnnnnnnnnnnnnnnnnnnnnnnnnnnnnnnnnnnnnnnnnnnnnnnnnnnnnnnnnnnnnnnnnnnnnnnnnnnnnnnnnnnnnnnnnnnnnnnnnnnnnnnnnnnnnnnnnnnnnnnnnnnnnnnnnnnnnnnnnnnnnnnnnnnnnnnnnnnnnnnnnnnnnnnnnnnnnnnnnnnnnnnnnnnnnnnnnnnnnnnnnnnnnnnnnnnnnnnnnnnnnnnnnnnnnnnnnnnnnnnnnnnnnnnnnnnnnnnnnnnnnnnnnnnnnnnnnnnnnnnnnnnnnnnnnnnnnnnnnnnnnnnnnnnnnnnnnnnnnnnnnnnnnnnnnnnnnnnnnnnnnnnnnnnnnnnnnnnnnnnnnnnnnnnnnnnnnnnnnnnnnnnnnnnnnnnnnnnnnnnnnnnnnnnnnnnnnnnnnnnnnnnnnnnnnnnnnnnnnnnnnnnnnnnnnnnnnnnnnnnnnnnnnnnnnnnnnnnnnnnnnnnnnnnnnnnnnnnnnnnnnnnnnnnnnnnnnnnnnnnnnnnnnnnnnnnnnnnnnnnnnnnnnnnnnnnnnnnnnnnnnnnnnnnnnnnnnnnnnnnnnnnnnnnnnnnnnnnnnnnnnnnnnnnnnnnnnnnnnnnnnnnnnnnnnnnnnnnnnnnnnnnnnnnnnnnnnnnnnnnnnnnnnnnnnnnnnnnnnnnnnnnnnnnnnnnnnnnnnnnnnnnnnnnnnnnnnnnnnnnnnnnnnnnnnnnnnnnnnnnnnnnnnnnnnnnnnnnnnnnnnnnnnnnnnnnnnnnnnnnnnnnnnnnnnnnnnnnnnnnnnnnnnnnnnnnnnnnnnnnnnnnnnnnnnnnnnnnnnnnnnnnnnnnnnnnnnnnnnnnnnnnnnnnnnnnnnnnnnnnnnnnnnnnnnnnnnnnnnnnnnnnnnnnnattacgggacgatgattacgtcacggtgattacgccaagattgtgggtacaagatgggcatcgacgtggcgttctctgattggataaggtaactgtgtatccagtagagaatccagtagggtgtatccagtaagaggtatccagtagcaggcttagaggtagcacgcggttgcgaactaaggacctgaatcgaatcactttgcattttgccaactactgctcaagtgctcttccttttatcaccgtgacgtaatcacctgaatgattgcggtacaacacagtgaaggtcacgccgacctcactgatgacgcgttcgcgtcacacggtcgcttggcgaggcgtcgtcacatcagtcttgacaacactcccactcgactcgtcagcgaccacgatgcccagcttcgtcctgagcgcgtcgaactgcggcgccgcgatcggcttcgtcatgatgtccgccagcatgtcgagtgtcgaaacatactgcaacaccacttgacagtcttccaccttctcgcgcacgaagtggtagcgaatgtcgatgtgcttggtgcgcttgtggaactccgggttcttggccaacgcgatggagccttggttgtcctcgtagatcttcaccgcttcatcgttcgccatctcgcccagctcgcacagaaataccttgagccacaccgcctcctgcgtggcctccgacagcgccatgtactcggcttccgtcgacgagagcgccaccgtgcgctgcttcttgcttcgccagctgatgcatccgccgttcatcatgaacgcgtagccgctcgtactccgtcgagactcgatgtcgccggcccagtccgcgtccgagtagccttgcaatccgccctcgctgctcgcttgaaacacgaggccgtgcgtcttcgtgcctcggatgtagcggaagaccctcttgagcgcctgccagtgtgtcggacatgggtccgctgcgaactggctcagcactcccactgccgctgcgaggtccggacgagtccccaccatgagatacatgaggcagcccacggcgttccggtacggaacattcgccatggtctcgtcgtgcttgcagcctccctcgcacatggccttggtcagcttcagatccggatcctgcggtgtcttcacagggttgctctcatccatcttgaacttctcgagaatgtccttcgcgaacttggtctgccgcaccgacaccttcccagtcgccacatcttgctcgatctccataccgaggaagtacttgagctggcccatgtcggtcatctcgaaccggtcactcagcgcctgcttcgtgtccttcagcatcccgtcgctgctgctggcgaggaccagatcgtccacgtacagtgccacgaacatcatgtcgtgattgtcccgcttcaagtagatgcagtggtcggactcgcacttcttgaaccccagcttcaacatgaactcgtcgatcgtcttgttccacatccgcggcgactgcttcaggccgtacagcgaacgcttgagccggcacacgtagtcgggtcgatctccgtccacatatccgtccggctgcgccttgtagatgtcctcgtccaacaagccgttgaggaacgcggtcttcacatccatctggtgcactgtgagcttgtacttggccgccagactcagcaacacccgaatcgacgtgaacttggccaccggcgcgaacgtctcgtcgtagtcgatgctgtacttctgcgagaaccccttcgccaccagtcgcgccttgaaccgctcgatctctccagactggttctccttcacgcggaacacccatctgcagccgatcgccttgcgtcccttcggcagtggcaccaggatccacgtctcgttcttgcggagcgactccacctccgagtcgcacgcctctttccacttgtctgcgtcgctggattccatcgccgacttgaacgttgtcggcatctctcccactaaatccacgacgtacgcagcctcgaagtcttccttctcttgtgctgcggcagacatctcgtccagcggttgctgtcgtctcggcaccgcataccgcttggcactcggaacctccacggcttccttgagcgactgcgtgcgcgggtgtcgcttgctgccgggttcaaagtcttgattccgcgcagcttcttctctgttctcgtctgatccggactgagtctcttcatccgtggtgtcttcatcatcatctgtcggaagacccaccaacacctccttcgaagcgtagtcgcgtctcccaccgtcgaagacatcctccatgaactgcgcgtcgcggctcaccaacacgcgaccgctctcgatctcctcgaaccgatacgccttctcgtgctccgagtacccgaggaaacgacagcgcaccgaccgagcgtcgaacttcgaccgcttctccttcggcacgtgcacgtacgcgtggcacccgaacaccttgaggttggccagcaaaggcttcttgccggtccaaacgtggtgcggcgacttgtcgtgactgatggcgcgcgtcggacaccggttgcggaggaacgtggccgtcatcaccgcttctccccagtactccttcgacaacccggcgtgctccagcatgcagcgcgcacactccaccagcgtccgattcattcgctcggccactccgttgagctgaggcgtgtatggtggcgtgaacttctgctcgatgccgcgatccgcacacaacttggccatcgcacccgaagtgtactcgccgccgttgtcgctccgaagcaccttcactcgcttgccggtctgcgtctcagccaacgcgacgaacgcagcgaacttggcagccacctccgacttgttccgtagtaggtacaccacgcagaagtgcgacttgtcgtcgatgaacgtgacgaagtagcgcttgcctccgaacgtcgccgtctgcatcggaccgcacacatcgctgtggaccacctccagcacttgcttcgcacggttcggcgacgacttcatgaagcttactcgcgtttgcttgccgagtgcgcacccgtcgcacacctcccactgcttcaccgacgtcattgggatgccagtgccgtagcccttcttgacgatggcgtcgagaccaccatggccgatgtgaccaagtcgaaggtgccagaggtacgacgtggtgtccccttggcgattcttcgagcttgccgcattggcctcgtcagcaggcgtcctcggcgtcatgcagagcttgaacagtcctttgccttcgcgagcgccgagcttccacttgagacccttcgtttccgcgaagcacccgtcgctctcgaaggtcactggcccgacgtccttggtgaagcggccgacggagaacaggttgcgcgacagcttcgcgatgtgccacacacccgtgagcacacccttcttcatgccgcgcggtgtctgcatcgacatcacgatgtcgccgctccccaccgcctgaaccacgccgtcgtccgccagatgcacgtccaccggagagatcttcttgtagttcttcatgtactccttcgagtacgtcatgtgctgcgtcgcacctgagtcgaccagccacatgccgctcagcttggaggcacccgtgtcgccaccaaccgagaagaggaagtcgccagagtcatcttcgacctgcgcgacgttcgctcgttgcggcctctgccgctccccgttctcgcggatccgcaccggacacttggcgatccaatgtccgtgctcgccgcagtagtgacaggcgctcgtcctctgcgcttgcgcctgccgtcccttgcgcttcatgtcctcgtgcaggagccgagacgtcacgagctcccacgtcagcgtgtcggaacgcgattccaacgccgtgatgaggaactggtacgactcgctcagactggcaagaagcgtgatcaccaagtcgtcctcgctgaccggagcgccgaccgcgtcgagctgttccgccagcgtcttgagcttgttaatgtgctccagcacatcatcaccttcgtccatcgttgtcgtgaagaaccgtcgacgaagaaagagcttgttcgccaggctcttcttctcgaagtgtccctcgagtcttgaccatgcatcatgcgcgtccttcgccgaccgcaccagcggcagctgcgagtcctccaacgcgagacagacgatcgccagcgccttgcgcgacttcttgcgaaacgtcgcttggtccgccgcggtcgtgcactgctcgagcttcacttccccactcgtcacttcccacagttcgcgctcctccagcaccatctgcatcttgaacttccatgtgtggaagttggttccgtcgaacttgttgatgcgggcggtcgcggtcggggcggcgtccatggcgaaggcgtagtcggggtcttggtcagggaagacggggcttgggctcataaccaaaaggaagaacacttgagcagtagttggcaaaatgcaaagtgattcgattcaggtccttagttcgcaaccgcgtgctacctctaagcctgctactggatacctcttactggatacaccctactggattctctactggatacacagttaccttatccaatcagagaacaccacgtcgatgcccatcttgtacccacaatcttgcacccacaatcatggcgtaatcaccgtgacgtaatcatcgtcccgtaatcacctgaatgattgcggtacaacacagtgaaggtcacgccgacctcactgatgacgcgttcgcgtcacacggtcgcttggcgaggcgtcgtcacatcagtcttgacaacaagaccgactatcggatgagctatctcatcgattacgctcggcgaggcatcgccgatgacagcactggtattagatgctattcgagctatcactgggatcaattcaattagctgtagctcactaaagctaaatagttcaaacgttgatcttggtaacctatcgctactaagtgcatgccctgatacagctcaaaacaacaaggatctcatccttggagcttctgggaccgctgcgcccagcctggagccaggagaaacgtcgactgcggtgtgtagtagcaaagtcgactggggtgaacacgatccagggcctaacgacgttcctactcaagccggaacccccaccgccgacgccgacactgaattccatgattcggatgtaaacccgatcactgaccctgagcagctgctggaggccgacctatatctcggtcatgcacgccatggttgcagaagggtctgtcgagggtgaggacacatcgaacgacgtttcggagcacgtagcaaacgagattgagctaaccgactacgcacaagagctagcgttcttgccagacctaactgaagcgtcggagacgacattggattactctgggcagaacgtccagaatgacgagctcagtgagaagcagcagacggacctggtcgatgtgctgaagatccacgagaaaatcatgattgcgagcggcaacgctctaccgcctccagcctatggtgttgtatgtgacatcaatgtacaggggcacgcgccgatcaagcagaagactcggcggaccccgcttcgcttcctcggtaagctgtacgaattgctgaagggtctgctgaaggccgggcttatctccttctcggacagcccatgggcgtcgccaatcgtcatcgtcctgaagaagaatggagtggatatccgcctgtgtatcgactacaaactcgttaatgcgatcaccaagattatggagtacgccatgcccctggtggatgacttgctgacggacatggaggcgtacttatggttttgctcgctcgacgctgctagcggcttctaggccattatgatgactgaacgagctcggaatatctccgctttcgtctgcgcactggggcacttcgagtggttgcgtatgcctttcggcctgaaaaacgcaccgatctatcaacgcatgattgacatcgcgctttggggcttcgtccaaccgaagggaggatggtttaaattctcggagtgcatgcgcctagctgaagaacatgacaaggaagctcatgctggggtgaacgaggcttcgactggcacggcaaagccattccgggccaagttcgaggctgaccgagataactcgcttggtaagggagctgtagccgaactggtcaacagccctatcgccgacatgttcgccaacggggagcccgatgactcctcgttgacaccagtattcagtcgccggtcattcgtggatgatatctttttcggcgccgagactttcgagtcatgcttggcgacgctagaccgattgctggcacggattgaagagtgccgtattagtatcagcttcacgaagagcatcttcgtgcagtccaatgtggactttctgtctcacgaagtctcggcaaaagatatccgaccagacgctaagaagctggctggggtgaccgagcttccgttcccgtcaacgaagaaaggaatgcagtccttccttggggcactcaactattacagtcgcttcatccaagacttcgcggtctatgaagcagcgctgtaccagcttaaggacgaggacttgcacccggggtgacctcaccgcggccaagcacagcttcgcgatgctccaacagaaggtttcggcagcgccgatactacgacacttcgaccgaaagaggagaatccatgttatgttgttcgccaacgagtgggccctaagctccacgttgatgcaagagtacgagggcaaactacaccccgttcgcttctgcggacgcgttttgaaggacgctgagatgaattatcacccggcagagaaagaagccctcgcgcttctgctgatactgaaggtgtgttatactcaactcgttggacagcgaatccgggtctatactcggttttcaacactcgactgggtccacaagtccaagacattgttcggtcgggctactcagttcgccgttttgctgtcgccgtggcatctgttggtcgaacgagtcaaagaaaccgactgctcgtttgcccaactacttcaagccgacttgacgaacttcgttgatttggataagtcactggcgttggttacaccccggacccgagggtcaccgactgctcgtttggatccgcatctgctctacgcacgcctatctcggtcgtaccggggctttgtcatgtcgtttgacgggtctgcgaagactgagagttacaggagttgctcatggatactatggaagttaccgaaatggacagtagtgctcgctgcgagcgcttacctcgagaacaccaccgttaacctcgctgagtatactgggatgaactatggtgtctccgctgcattacagcacggagccgacgatttagtcgtcttggcgactcgaggctcgcgatccagcaagccctaggggtgatagcctgacggaaggagtcattgctgcagcaactcagtcaccaccaagaactcacagccaagcttcggtcggtgaagtacctacatgtggtgagagagtttaacgctgcggccgactctctggcaagcgaggctctcgagagcaagaagtctacagtggtatcgtcggatgtccgagtactagagctgatgaagctgaaccgtatcgctgaagtcatctacgaggttgctgacggttgcgtcgtcgaggacataccctcggccaacacagtatggctgtggtagcttctgtcaaacctcgcagcaagaatttttcgattttgtgcgaagaaaaaccgaccacagacggcagaacgagactgaacccggacatgtggctgtgatgaccagacgtcaaacgagagcaaaggagaaacacgtccggtttgcagatgaagcctcggtcaccgatcagggagacgcatctctccgagtaaaagccaatggtgtgccgaacgagtctcagaatgaagcagaagcttcaccgctgcgcgccgagacgtcaccagccccaccgaacgcggaagacattgacccgctggtagtacaggaagaacgccgaaggagaatcgccaccgctcaagatgaagagttacggttgtcgaatctgatggtagtgctccggggagatgatgcgaagattggatacagagcagcacgagatgcatggaaaatggcggaccaatttgtgttgagcgaggacgatgtgcaatattacactagaacgagccgtcgttcgagtgacgacgagcaagccgagttgaagatgagactcgtggtaaccacaacgatgatccaagaggtcttgcagagctgtcatgactcactcgaaggtggtcatcaaggtatcacccgtacactgcatcgggcgaggagagactattactggatcggccagtatgccgatgtggagaaacacgttaagtcgtgccctggctgcagttcaagtaagagccgacctcagttccgcgggtactcgccagggaacatcctagccgagagacccttccaacttctctctatggacttcgtgataccgctactgaagagtcgccgtggcaacacggctctcctgctattccaatgctcgttcacgggattcgtgatgggcaaagccatgtccgacactactgccttactcgttgcgcaagctttcgaggagtgtgtctaccgacgttttggagcaccgtccttgatccgtcatgaccgagatcctcaatatatgagcgaggtcttccaagccttcgcggaaatgatgcagtctcggtcgagagcgaccctgagataccgcccgcaggccaacggccaacaggagagattggtgaagacgatcatgcagtcagtccgcgtatacgctgaagacccactacagcaggattgggacgagatcaccgaaagactgatcttcgctatcaataactcccgtgataagacgaggaaggaaaccccgttttacctcgttcaggggtgggatgcacagtcgacgctcaaggcaatgtcctcgtcactcaaacgaggcttcggtagccaaactgacgcgctagcagggcgccgagaggtcaactgacagcaggaaatcgccctgaggatggccaaggagtaccaagccgcggaaaaggctcggagagctgaagagcgcaatgaatcacttggcaggaaggagaaggaagctacgacaggcgttaacgagaatagcacctcggtcgaccgagcactgagttcccctgaacatggcggagctacagtgacgagaacgaggcttcctctgtagcctggaagcagagtgtggctgtacatggggcgggtccgaccaggactgaccaagaaactagccaatcggtggcacggaccgttccgagtgaagaaggtcgacgattttgcgtatgagctggaattacctgaccgaagtggataccggttctacccggtggtgcatgtctcacgactcaagtcggtggacgagttcgaaggccgaccgagggctcgtttggctcgtgaggtcaccgaagacactcgtcttgacttcgacgaggaactactgcctgaacacagttttgagccggaccacttggacggcgaatatgaagtcgaggctatcctcgatgaccggaccccgttgtcaacgagtactcaccgggccgtccgagagttcaaggtgaagtgggtcggctatgacgagccgacatgggaaccagcgtccaatctgtcgtgcagtggcctcctgtacgattacctacgccggaagcgaagcgaccgacgcttgcaagtggtccaggtggccgacgaggagtaattctgcgccccaaggaggatagaactgctcgcgggggcaatccagcccgcgatgtcagacgaacgaggctactggagatgatgattgaactgcctgcgagggctatccagctcgcagtgacagacgaagaaagttactggaatctgcatgttacgtgttaagtgaacgagtcacgatggaatggagatatcggaatggagccagggacaacggaagacgcaaacaagcctcggtcaaaccctcaacagacgaaacaagtgataatgaagcgactaggagggtgaccgaggctttgggtgcagcagtcgaagtggagcggtcaggtgtcaagatggagacgtcaaccactctagcaatggggccctcaaacgcctccgagagtgcgtcaaaagcctcactaagaccggtcttatcagtcagtaagacgggtcttatggatctgtaagaccggtcttacggatttgtaagaccagtcttagtcgatggaccaagccaatcaccttggccttggagtgggcatgctactgagtgggaacgctgcacgaggtgtaagcgacggcgagaagaggtgaaacacgtgctggtgaagctagtggtaggtcgaccgaggcttcggacgcaatagccaagaaggaacgaggccgggcatgcacgctcaagcccgtgactaagtatggagctgatgatggagtggcccgtgagtggtggagtgcaacggctgcgaaccaagcctcgctcgaggcagccacagcggtcgagggctgagaagaagctctgggaaccgcgaccgagtattgaatgcgatgtacgttgacgcgagaaaagattatgaagtggaacgagcaaaacgacatttattctgattaagatgatgttgaggcgaggcgggtgaacgtctttatcgtccagggtgtatagcgcactatgccggaccgaatgaattcgggttcggagtaccagagattgtccacgcgataaacagcctacgggacactgaatgacccgggcctggaaccgcttggacgcaccgaatcgcactaatgcggtctggtgtttggcgtgtgtccttgtgtcaagccctataggtatcgtttacctttggcggaccggatttcaccgagttgagttgttgcgatacagaataacgtctgctgggtgtgttcctgggatgaaccacaccgaatgaacagaaggtcagaccgaatgaaagggaccacagtcagatccgtaattccgaataaccaacacacagaaatacaatgccgagataaacgtcacaaaatatacagccaccacttattctttgagacccttgggtggggggtctatacaccagtcaacttcggagccgtcacccaaggaactggtcagccctggatgcacactcacttacgcgcaccaccctcacagaatgagggaacaatacaaaatatatttcagtcctatcactcagtagtcaatcaattcagtctggggggtgactacctcaaccaccaaagacacacagtagggaatatgaaatggatgcccggttagagcacgcaaatagaaaataaagctctcacaggtcactccggggcgcgaaaccccagtcactgccgactttgccttggtacctttgagtccccactacaccagtgctcgctacaccagtgaggccttggaagcgtccctaaacgtacttagaccgcgcacaggcagtctcccggagggctcttgaagacgtcaaagtcggggtgctacttctgccgcgagcacagagtcgtccgcgtgatcttcggcaaattggtttctgtttagatcttacgtttggctagttatcttctatcacttcgctgactttaatgtaggtttcactatgcttcgcttgtcttgattatgcttgtgcttcttggcagttcttcagtatgcttgtctcagatggatctggatctgtacccatgtgatccagatccaagatgggttcaattcgacatcccagcgtaatcgtggagtggtggacacgactcgacgggcaagcagctgacacgcaatgaaggtaaagaggggccatagagtcggtaagtatggatgggatgataggatccacatggcgataggattttgggataggaacgaacttaagcataaatcagaccaaaatttgccttgtacaacgcaagcgcttcctccctcgcctggaaacgggaacgacattggccctgcacggcgtagagaggttagcggtagcagatctagtgttggttgtaagactggagtaatatattggccagatccaagaccttcctagtaaactacctgcaagtgcagatccaagatccatcggagttacggtgcgtccctctcgtctcaactgtcaacgacaccgtcattggaggcggcaaacacgaccaaggaagacctgcgaaggcaacgtaaaggacaacaacctcgaaaggcaacaacccggtcggatccagatccaggccgccagatccaagtacaagaccactggatttggaatattaccacgagcagagtggagatttccgcgctgctccacccacatccccgcgtctcgcccagactgttctctcttcaaggctcggacgcttcggaagacaccagaggagcaagatccaggtagggcttaccgacgggtacacaaggtgaccaagttcagcacacagatcacggatcatcgggggaccccctccgtaagtcggtgttcgggcgcagttgggaagttggattggcaatctcgcagattttgctgatcccgctacaccacaatggttgcgcgtgcccggatcttctggtgactcgggatttcaccgtgagtcccaagaagaagttcgagtgaagaaggaacaaggggatcaagcgtcatcggagtcgggatcgacgacgacgctgctgaatgaaccaagatccacggatcgacagagtgcaaggaggacctctgtcggcggaaccgaggtggatccagacatggatccagaagagaaacctcaacctcctccacaggtcccttcggggaccccggtggatcgcgacgcgagtcaagttccaccaacaaaacaaaccaaggctagcaaggatcggtatgcatttgctgattcaccagttaaaccggatgcctacttcttgacaagaccaagtcgatgacacgagcgaagctgaaggccccggatctggatgacgaagattcaaaagcgtcatcccacgaagaatccgaggaggcaggctggatacgttaccacgagaagcagctacgtgacttcctggcttgggatcccatgatgcggctgcttggcgtgaagccgatcggagaagggcctgtggcattccctgcacccgccaagcgtgaagggatcctggccgagatggagcgactcatgcagcggctgaaggaggccggccttgtagctggcgccttcgacgcgagagcgatctacgacgccgatccaatccagatccacgcgacgacggacatgctgttcaacaggctgaaggcgctggtaggtgagatccggatccagaagtcccggatccaagttcacctcaagctggatccacaggatgccgaacgtcgtcaccatacgtgtccgccgcggagcttgggtcggatacatcttcggagccgcggcgtatgtcgcttggaccctcgggagcctcgatgctacgcgcccgagcccagatccagcgtgaagcaagcactcagccccgatcccagccccgacccaagaagccgtcgactccttcggtggatccaacagctacggcatcaggatcgaacatgtcgactggcaggcttgagtcatactttcaggcagccatgggcaggttcttgaaggagcaaggcgtgttgaccccgacacaggcgccggaggcgacgcagaacgccggatcccaggacgtggaaatggagtccactggtttgtccgatccagatcaacactggaagtacgatccagatgacatcgacttcccggtcccagctcgcgctacagtggccaccaccgcgaccggatccacaggttcggccctgatccaacgagtccggatctcagcggtctcggatctgaaggagttctcagggaaggaccaggatgaggatcgggcgagagcatggatcagtaaggtgaagtctgcgttcctccgtgaccaagcccctgacgaggagaagtgcttgaccttcgcggaccttctgtccggatccgcgaggaactggtatcgccaactacctcgatccacacgcaacaagtggtcggatctgctccgcagtttccaaacccagtactgtggattggtgatctccgttgctcgccagtattaccacgcgcgcaagcgatccgatgagtctccgctggattatctctaccgacttaatgtcgctggactccgcgcccgactcaagatcaaggatggtggatccaagtagaaacgcgagcacgtgaatcaggtcatcgaaactctgggtgatcaggatctagcggatcgactgacattgctccgactgccggatgctgacgagctggaagaggttctccgcgcactggatcgggcgaagaatcgacagaagaagtctgcgaatggagccagcaagttccgccagaaggcccccgcgacacccgcaccggccgctccggccaaacatgtgcgtgcgatccaggtccaacctgacacgggatccgagcctggatccagcgatgaatctgactccgagtgcgacgattaccgcaggatctatctggcggcagcccaagaccacgcgaagcctgcagaggaagagcagaagactctggatcgaaaccttcaagaccgtccgaagcaggatccaccgtctcgcgactcccgatccaggacgcatgtggggggacccgaacgtagtcgatgcacgcactgtggatccaagcggcactcgcatcttgcctgctggaaacgcttgacgtgtgagaagtgcggcaagaagggtcatccaggtgatcactgccttttcgtgtgctgtggatgtggtgaacttcatgacgtgggccgatgcccgaaggaagagttctacaaccagatccgccagtggttcaatccggccaagcatgcggggatgctgccagagatggcggagaagatgttaaactaggacgctcgccgggttggaatccggtacgagccaaacgttctaggtattgcatctatgcatttgtgaacaagacatcgacagatccagttagcaaacgacaggatctacgcggtaatacatgtgatcttcatgggaaacgtactgctgtggtctcaagtctctgacaagctgatgactactcaagatccgacacgacagtggaaatggattatgatccggaggcacgtcagggatactggaagcagcaggatccagaccagtggtttaagcctaccgaaggtgaagacacggctggatccagatccaggcgtgttgctgcgaaccggcggaccacggatccagaatcttcgtatctcctacccggagaatcccgaggatactggaaacaacattcgccagggaattggttccgtcaagccaagatccacggtaagatcaacaatgagaaagcgatcttagtcctagatacaggtgccgaggtgtccatcgtggataccgcctttgctcgtaaggttgggtgctacatcggcaggagtcagagccaagagtgtgttgggatcggagacaacgtgtatacaacggaaggaagaacacggatcatgattaccttgggcggatacctaatgtatttcttcgacatttatctggacaagaggccatcctcggtatggattacatgatgccggccgggatccggctggatctggccgacgggactctctgcctgcccgatgaagtccggatccagctcagcggacgccgtccactctacagtgacaaggcgcagtccgtgaagctggatcgatacttgcaacttgggatcggagagtccgcggagctgcccatgcgtctgcgaggatcggaacacgacaagctgtgggttacgcgaggggatcgatgggtgcctacggtaatcaagggcccaggcaaggtacggtaccttcagatcacgaacatcggagagaaggagctggtgttgcgccagagcctccaagtcgggatgtggctggccggagatcgagtcccgcggatccaaggttacgtgtccatcggatcccgccgctacatggagtggcagaacctcgcgctgcaggccacgacggacgctggatccacggaggcggaacccccggaggccccaccagggcctatggtggagcgccccgaatacccgacgccgcgcgcaatactgcagagacggcatccagcacaagtccgacaggtggaggccagatccaagggagctgaggacggacaggacggatcgtcgtcagatccacccgaccagacgactgaaggacacatcgccgggacgacaggaataccgctgctccaagcttcgactacggctcatggtttagattcacggccggaggagctgctttagtatgtaccaagcttcgatccagcagctgaaggtccgccgaagtccgatccaagcggtggagactccgtgggaagaggcgcgccgacacccacgcgacggggttaactgagtgcaggacggacaccgtgttgggcgatgaagcgtcgcgacgggtggcgatcctaggcccatccccccaggtccgatcccaggatcttgggtgtggacagggcgaacggactgttgaacatccaccggagtcagatccggtgtcagcagcagacggcgaagcgacacagctgaaggtgccccgggtagcgtctacccgggtgcaagaagcccaagcagctgcgcctaatcgtacacccgctcccgatccagacgaagctcctgctgaatgcgcgcccggcctggatccaagcgccgatcccaatgtcgaatactcgctgggaccagacgatggatcgacagaccaagatccaatggacgatacgcaaggttgcgaggggcgctgggtccagatgatgtggtccaggcggtccaggccgttgtcacattgggtggtaatcacggagagacagggggcggatcggcagattcgacagatggtgctacgggacaggtcatggattcagggggatcgctaaggagagccctcatcgggagggccctcgttacaaccagggcatttgggtaaacagatgacagtaggtaacgctttgaaatgggcaactagaaaacccaaaaccagtgacccgcattagctcgagagggtcacaggtgacggcacgctagagctgaagacgctgcagacactgcttcattgagcccaaagcagcaactcaagcaaccacaggggaacatttgccatggcactcatggcagccacagaggagacctcggaggagccttcgggggccttcggaggggacctcggaggacaccgtggagtagacagcggaggcggccacggagaagactacggagaagaccatgtagtaaacagcggagaagacagcgaaggcggccatggaggagaccccggaggagaccacggagaagaccacggagaagaccacggagtagacagcggaggagatggcggagcagacctcgcagaagaccgtagaggacacagcggaaacgaggggcgtctggaggatcatgccgagagccgtggagtagagccctgccgtggcaacggccctctcgactacgcacaggagttactactgaggaatgggcccttgaaatagcgtttgtgatcctcgtaggcaagacttatctgctcatatccgttctgagcaccccaacgcacacatattcagttttattctacctttctatcattggtataaggttccattgcgtgttgagatcgtaggaattcgcataagattgcgaggtagtatctttggcgagttaggaagtacccggtcacatgactcgctatttcatatagtgcttcattaaaaaaagcaacctcgccacacgcacaacatgaagctctatgaagacgggttccaggttatcaagaaggcgattacggaagcacaggccgcagcgattcgactaaaggtcaatgacatcgagcagtgggcgactgttttcagcgtggggccgaacaagacgagctcaggttgcaggcgtacgtcccgcagtgggaagaatccgatgatccgttggtgccaatcgagaccgcagtgaatggctgtgcctccggatacaacgaacactgggtcattcgtcctggctcgtgggtgtttctgaagtctttcccgggtggccctcagcagcaagtccatagggattttctaaacagcgaaaccgttgatgctgacgatgaagagctgcccgcgtttgttctaatcgctttgcagaatggaaccagactcgcgacttacggatggaataaccgccgaccacgaaaggagactgagaagattgtatcgctaaacaaaggagacttggtcatttgcagaggtgatctcgctcaccgcggtgtttcctacgactgcgtcaacatccgacttcactgctatttggatgttgatctccctggggtttcctaccgatacaacatgactcagctctgccgattccagatgtacgcatgtcgtacatgttcagttgcaactttcgacatgaagtcagctcggcgtgagcatgagaacggttgcacatagttttactgcggtttatgcaagaggacgtttgagcacaaagatactttgaagttgcatcgacgcgtccatcattcctacgtgaggctttgaggtgtaggtgctgcatatacttagcatttatacttagtatttatcagtcatgtataatatttctttcatggattatattatatacatgtactgctcttcaaaaacaatgtataaacttgaaatgatgacctagaatcgcagtttaaggtcattattgagggttgctggtcttggatactgtgtaccagttgtacccattaaccggttaacccgaaccggtccaatccgaacccacgttgattatggtgatttcggtaagttgtttacgccaccgatgattagacgagtaggatgattggatgaacaccggtgagtgatggttgattagatgcactaggtgataggacgcagggtcgcgtgtctataacagtagggtgtaagctccaacaattcaatcactttcgaatcttcattctacccctcaagtgccttcgctccggtcccgccgtctgcgacgtccctccctccgcttcgtccgagcttcgtgtccaagatccataccttccatcaggttatgagcccaagcaccatgtcctctgcccatgacgcctcgaccaaggtctccattgacaagttcaacggggacaactacgcgacgtggaaccgctacatgcgtggcgtgttcctgaccaagtcgacgtggcatgtcgtgaaccgcgagacgacgccgagcttcacggactcgcgggccaaggacgactacgtcaagtcgagcaacatcgcgttcggactgatgttgctccacatggacgcggactaccaccatgtggtcgacgactgcgaggaagcgtgggttgcgtggacgcgcctgaagacgctgtacggtggttcgcagaaggctggacgcatctacctgaagcgccaactcttcaggatggagatgtcggaaggcggcaacgtcttgcatcattgcaacgaggtcctcaacatcagcgccaagctcagcagcatcggcgccaagatggaggatgaggacgtggcgatctgcctgttgcgcagcctccccaagagctacgagaacgtcgtgctgaacttggagatgagcagcgctgaactacgatcgcaagacgtcgtgaaggtgctgacgaatgagcacatcaagagacaaggcgagaagacggcgacggtgaagacggagaatgcggccaaggcgttcaacaccgaccgagagtctcgccagtgtacgtactgcgggaaattggggcacacgattgacaagtgctggaccaagcagaaggacgagaatcggggcccaagacgcggcggcaatggcaatggccgtggacgcggggccaacaatgcccagtggaggaacgacgacgccagcacaactacgactacggctatgatcgagtggcgttcgcggtctcactggagtgtggcatttcgacgggcaagaatgtgtccgggttgtgggcggtcgacagcggcgcaacgcaccacatctgcaacgacaaggccaagttcgctcatttgattgagcggaatgaaggcgaactttcggtggccgacggcaacaaggcggccatcatgggtgtggggaccatcgtggaacgagtggttctgcccaacggcgacgagcgcgacatcgagatcaagaacgcgctgtacgtcccaagcatgagcaagaatctgctttcggtgccacagatcaacaagagtggtctgttccaagtcgtgttcgacagcaccaagatgcagattgcgcacaagggctccaagcaagtggtggcgacggcaaacctcgtggatggactctactggctccagacgcctcagcgatcggcgaatgcggcgaccagtgggaagacggtcgacttacacgcgcgtatgggtcacgctccggtggaggtgcttcgcaagatggtcgacaacaacatgatcaaggacgcgaaggcaccttccaagtcgagtggaccaagcgtgtgtcgcggctgccaacaagggaaaatggtccagaagccgttcccaagcaactgtgacaagcgtcactacgacacgttcgagctgctccacttcgacgtgtgcggccccatggaagaagagtcactgggtggcagcaagtatctgctgctgatcgtggacgaagccagtggatgcatgaaggggttctgcctgcgtgccaagtcggagagcgaggactgcatcaagatgtacgtcacgaaggtgcagacgcagttcggcaagaaggtcaagtttgtgcggcacgacggagcccgtgagttcgcgaccaactcgctcaaggccttctacgaagtcgaaggcatcgagcagcaaaccacggttccgtacgcgcaccagaccaacggcacggcagaacgcgccatccggaccatcgtcacgattggccgcagcatgctgcatcacgccaagctggacaagagcttctgggctgaggcggccatgacagccatctacgtgaagaatcgtctgccatcacccaagatcgaacacaagactccgttcgagatcgtttacaagtccaagccgagtgtgaagcacatgcgtgtgttcggatgccagacgtacatcctgacgccgaaggaaagacggcgcaagtgggaccccaaggctcgcgccgggctgttcctcggctacgaagaagtgtccaaggcgtatcgagtttatgacatcgaggcggggcaggtggttatcagtcgcgatgtcaacttcgatgagtcgacctttggactttcgacgcatacttcggatgaagacgtcgatgatgctgtgttgcgctggacctggacgacaacgatggaccgcgccaaacgagcttcaagcaggcggggaagcgcaagtaccgaccgagtggcgacgacaacactgccagaagatcgcgccccgttcgccaccgagctggcttagaagaagcaagtgcgccggacgtatcctcctcgcgccgagccgaccccgacgaagaagaaaagtctggggaccaagatgaagacgacgactcgacgcctccagtgttttggcgtgccagtgccaacgctgtggaagcagcagccgatctatcggagccgacgacgttccaagaggctgtgaacggtcctgatcaagtgcactggcgcaaagcgatccgcgcggagctcaagtcgatgcgactgcgtggtgtgtttcgagctgccaagttgcctaacggacaacgcgccatcgataccaagtgggtgttcaagatcaagcgcaaagcggacggctcgatcgagaagtacaaggcgcgcctcgtggccaagggcttcaagcagaagtacagcattgactacaccgagaagttctcgcccgtggtcaagtatgtgacactgcgcatggtgatcgcgattgctaagtattttggctggcccctcgaccaactcgacgtggtgacagcattcctgtacgggataatgaaggaggtggtcttctgcgtggttccggaaggcgtcgaactggatggtgacttcgactgcctggaactggtgaaggccatctacggtctcaagcaagcttcgcgagtgtggaacgagaccttcggcgagttcgtgtgctccatcggcttccaagtgtcggccttcgatccgtgcctctacatcaaggtggtggacggtcactgcgtgcttgtactggtgtacgtggatgacgtactagttcgcccgagctgatcgcacgcacgaagaccgacctgaagacgcgcttcgagatgaccgacagcggcaagtgcgcgtttgttcttgggatcgagttggtggacggcccggacggcagcgtgaccatgtgccagcggcgatacgtggacgacatcctgaagcgcttcgccatggacgagtgcaaggccgtggtgagtccggtggacatgagcactcgactggttccaagcgacgcggcgaccaaggtgaacgctccgtttcgcgaagctgttggtgctctgatgcacctgatgaccgccacgcgcccagacatcgcgtacgccgttggctatgtatcgcgcttcatggagaacccccaagaggaacactgggttgcggtcaagcgtatctttcgctacctgcaaggcaccaagacgcatgggatctgcttcaagccgggcgacaagatcgactttcgtggctactcggacgcggactgggccggcgacctcgccgaccgcaagtccacttcaggctacacgttcatgctcatgagtgcgcctgtgagctggggaagcaagaagcaatgaagcggagtacatcgcgctcaatctggctatccaagaaggcaagtggattcatcgcctgctatgcgagattctggcggccgctaatgagactagacccgaactcatgatccgcgaagacaaccagtcgtgcatcaagatgacgaagaacccagtgaaccacggtcgcgccaagcacatcgacatcaagtaccaccacatccgcgatgaagtcaagcgcggcgaagtcaagctccagtactgcgagacttctgtgatgctagcggacatcatgacgaaggcgcttgcgggaccacgccacacggatctgacggtggctctcggcattcgtgggacttcgcattgagggggcgtattgagggttgctggtcttgggtattgtgtaccagttgtacccattaaccggttaacccgaaccggtccaatccgaacccacgttgattatggtgattacggtaagttgtttacgccaccgatgattagacgagtaggatgattggatgaacaccggtgagtgatggttgattagatgcactaggtgataggacgcagggtcgcgtgtctataacagtagggtgtaagctccaacaattcaatcactttcgaatcttcattctacccctcaagtgccttcgctccggtcccgccgtctgcgacgtccctccctccgcttcgtccgagcttcgtgtccaagatccataccttccatcagtcatcgccaagcaatggccctgtatcatagttttgggtcaacttgatatgatgacctagaatcgcagtttaaggtcatcgccaagcaatgaccctgtatcatagttttgggtcaaacttgatatgatgacctagagtttgcggtttaagtataaggtgacacttgctcgcggtttagtaccaagtcaatcaatagattccaataagaactaatcaatgaagtatatatataagtgcagtatctaaaccaattaaaatggctttctgtttgcatacccccaggatcttggcggcgcatgagtaggctggtacgtgttcatgtggttcatctcaacgtgctgtggcggaagtaaagtctggtttagcacatcttggtctagttccacgcgagcgtgagggcttgccccagtaaggttgaactccacagtggtagtgtcgaatcccccattcaccacaggcatggtaaaaaatgggagggacgaactactctggaggtagggtaccgggagtgtagggacagcggaagggtggtttagatcaactcgttctgcaaacgtcggcagacgtgcagtacccgaggcgccgtaattagccttgtgagatcgcgcgacgcggcgggattttcttaagctggctggttcccgaatccttggccgccaagtctggatacgattgcgataaatccaccagtgagcgtcgaaatgactcggtagaagcctagaagatccattggatttaagcatagcgatgagttcatgaacacacggcctcgcatgaacagtgcgaaaaattccagagcaagctcgatacggtttagctccacttatgatgtccatggcctctttccagagactgtgagtagcacgaagagcccaaacagtagtcacacgcgaaacctgtgtgtatctgtcatgctgaagtagatacggcagtatcgtggcatcacaagccgcacgttcgctcacaccacggtaatagccttctaaagacggtgtacaaatcaccgttgcagtcgtgcaactagcgtttacattgcgcatgcgttccttccactgccgaagtatcacgatagccgtagtgacggtggcggtttgtccagcaatgaacgcgtttggctttgtgtttccaccaatgttcatccaggtacgaagcaatcaccggtgagagtaagtgcaattgggctcgacgaaacttaaattcttgttctgtttccgattccacagtcttgtagaaataatccatgaagacttgagtctgccacgtgttttcgtatttatcccggccagggagaggattgagaacggcaacctgccccaaaacacttcgggttttttctagcacattccagttgaagtgccaacgacaaatcatggtcggaactaaggcgaaaaaaatggcgagagcattcaaacatgccaattcgcgatccgtcagtatcagggtacaccgtgctcttcaagcatagaacgaagcgtcttgagaaaccagctaaaatttacctccttctgacgagggaggaagcactacgctacaggcagtactgtgttcataccagtcatgtatatgatggaaggtatggatcttggacacgaagctcggacgaagcggagggagggacgtcgcagacggcgggaccggagcgaaggcacttgaggggtagaatgaagattcgaaagtgattgaattgttggagcttacaccctactgttatagacacgcgaccctgcgtcctatcacctagtgcatctaatcaaccatcactcaccggtgttcatccaatcatcctactcgtctaatcatcggtggcgtaaacaacttaccgtaatcaccataatcaacgtgggttcggattggaccggttcgggttaaccggttaatgggtacaactggtacacagtacccaagaccagcaaccctcaatacgccccctcaatgcgaagtcccacgaatgccgagagccaccgtcagatccgtgtggcgtggtcccgcaagcgccttcgtcatgatgtccgctagcatcacagaagtctcgcagtactggagcttgacttcgccgcgcttgacttcatcgcggatgtggtggtacttgatgtcgatgtgcttggcgcgaccgtggttcactgggttcttcgtcatcttgatgcacgactggttgtcttcgcggatcatgagttcgggtccagtctcattagcggccgccagaatctcgcatagcaggcgatgaatccacttgccttcttggatagccagactgagcgcgatgtactccgcttcattgcttcttgcttccccagctcacaggcgcactcatgagcatgaacgtgtagcctgaagtggacttgcggtcggcgaggtcgccggcccagtccgcgtccgagtagccacgaaagtcgatcttgtcgcccggcttgaagcagatcccatgcgtcttggtgccttgcaggtagcgaaagatacgcttgaccgcaacccagtgttcctcttgggggttctccatgaagcgcgatacatagccaacggcgtacgcgatgtctgggcgcgtggcggtcatcaggtgcatcagagcaccaacagcttcgcgaaacggagcgttcaccttggtcgccgcgtcgcttggaaccagtcgagtgctcatgtccaccggactcaccacggccttgcactcgtccatggcgaagcgcttcaggatgtcgtccacgtatcgccgctggcacatggtcacgctgccgtccgggccgtccaccaactcgatcccaagaacaaacgcgcacttgccgctgtcggtcatctcgaagcgcgtcttcaggtcggtcttcgtgcgtgcgatcagctcgggcgaactagtacgtcatccacgtacaccagtacaagcacgcagtgaccgtccaccaccttgatgtagaggcacggaccgaaggccgacacttggaagccgatggagcacacgaacttgtcgaaggtctcgttccacactcgcgaagcttgcttgagaccgtagatggccttcaccagttccaggcagtcgaagtcaccatccagttcgacgccttccggaaccacgcagaagatcacctccttcattatcccgtacaggaatgctgtcaccacgtcgagttggtcgaggggccagccaaaatacttagcaatcgcgatcaccatgcgcagcgtcacatacttgaccacgggcgagaacgtctcggtgtagtcaatgccgtacttctgcttgaagcccttggccacgaggcgcgccttgtacttctcgatcgagccgtccgctttgcgcttgatcttgaacacccacttggtatcgatggcgcgttgtccgttaggcaacttggcagctcgaaacacaccacgcagtcgcatcgacttgagctccgcgcggatcgctttgcgccagtgcacttgatcaggaccgttcacagcctcttggaacgtcgtcggctccgatagatcggctgctgcttccacagcgttggcactggcacgccaaaacactggaggcgtcgagtcgtcgtcttcatcttggtccccagacttttcttcttcgtcggggtcggctcggcgcgaggaggatacgtccggcgcacttgcttcttctaagccagctcggtggcgaacggggcgcgatcttctggcagtgttgtcgtcgccactcggtcggtacttgcgcttccccgcctgcttgaagctcgtttggcgcggtccatcgttgtcgtccaggtccagcgcgtccaagtccaacacagcatcatcgacgtcttcatccgaagtatgcgtcgaaagtccaaaggtcgactcatcgaagttgacatcgcgactgataaccacctgccccgcctcgatgtcataaactcgatacgccttggacacttcttcgtagccgaggaacagcccggcgcgagccttggggtcccacttgcgccgtctttccttcggcgtcaggatgtacgtctggcatccgaacacacgcatgtgcttcacactcggcttggacttgtaaacgatctcgaacggagtcttgtgttcgatcttgggtgatggcagacgattcttcacgtagatggctgtcatggccgcctcagcccagaagctcttgtccagcttggcgtgatgcagcatgctgcggccaatcgtgacgatggtccggatggcgcgttctgccgtgccgttggtctggtgcgcgtacggaaccgtggtttgctgctcgatgccttcgacttcgtagaaggccttgagcgagttggtcgcgaactcacgggctccgtcgtgccgcacaaacttgaccttcttgccgaactgcgtctgcaccttcgtgacgtacatcttgatgtaatcctcgctctccgacttggcacgcaggcagaaccccttcatgcatccgctggcttcgtccacgatcagcagcagatacttgctgccacccagtgactcttcttccatggggccgcacacgtcgaagtggagcagctcgaacgtgtcgtagtgacgcttgtcacggttgcttgggaacggcttctggaccattttcccttgctggcagccgcgacacacgtttggtccactcgacttggaaggtgccttcgcgtccttgatcatgttgttgtcgaccatcttgcgaagcacctccaccggagcgtgacccatacgcgcgtgtaagtcgaccgtcttcccactggtcgccgcattcgccgatcgctgaggcgtctggagccagtagagtccatccacgaggtttgccgtcgccaccactagcttggagcccttgtgcgcaatctgcatcttggtgctgtcgaacacgacttggaacagaccactcttgttgatctgtggcaccgaaagcagattcttgctcatgcttgggacgtacagcgcgttcttgatctcgatgtcgcgctcgtcgccgttgggcagaaccactcgttccacgatggtccccacacccatgatggccgccttgttgccgtcggccaccgaaagttcgccttcattccgctcaatcaaatgagcgaacttggccttgtcgttgcagatgtggtgcgttgcgccgctgtcgaccgcccacaacccggacacattcttgcccgtcgaaatgccacactccagtgagaccgcgaacgccactcgatcatagccgtagtcgtagttgtgctggcgtcgtcgttcctccactgggcattgttggccccgcgtccacggccattgccattgccgccgcgtcttgggccccgattctcgtccttctgcttggtccagcacttgtcaatcgtgtgccccaatttcccgcagtacgtacactggcgagactctcggtcggtgttgaacgccttggccgcattctccgtcttcaccgtcgccgtcttctcgccttgtctcttgatgtgctcattcgtcagcaccttcacgacgtcttgcgatcgtagttcagcgctgctcatctccaagttcagcacgacgttctcgtagctcttggggaggctgcgcaacaggcagatcgccacgtcctcatcctccatcttggcgccgatgctgctgagcttggcgctgatgttgaggacctcgttgcaatgatgcaagacgttgccgccttccgacatctccatgctgaagagttggcgcttcaggtagatgcgtccagccttctgcgaaccaccgtacagcgtcttcaggcgcgtccacgcaacccacgcttcctcgcagtcgtcgaccacatggtggtagtccgcgtccatgtggagcaacatcagtccgaacgcgatgttgctcgacttgacgtagtcgtccttggcccgcgagtccgtgaagctcggcgtcgtctcgcggttcacgacatgccacgtcgacttggtcaggaacacgccacgcatgtagcggttccacgtcgcgtagttgtccccgttgaacttgtcaatggagaccttggtcgaggcgtcttgggcagaggacatggtgcttgggctcataacctgatggaaggtatggatcttggacacgaagctcggacgaagcggagggagggacgtcgcagacggcgggaccggagcgaaggcacttgaggggtagaatgaagattcgaaagtgattgaattgttggagcttacaccctactgttatagacacgcgaccctgcgtcctatcacctagtgcatctaatcaaccatcactcaccggtgttcatccaatcatcctactcgtctaatcatcggtggcgtaaacaacttaccgtaatcaccataatcaacgtgggttcggattggaccggttcgggttaaccggttaatgggtacaactggtacacagtacccaagaccagcaaccttcaataggatatgacatttaaagtggtaaatcgtacttgttggttttgaacgtgccatccattatcaatacatcacaatgactgatgtgaagacgcagagtagccgggtgtgcccatcagagtcaatatccgagctatcagaatcgtcagaattataatccaaattgaaatcagggaagtcgtactcaaacagcaataaatctctttcagatcttgatatcccgaagtctgaacaaatcgaactgtcacgatatgcgaattcttcaattcctttgtcataaccatcgtacacgtagcagtcagatatgccgctgtggttcgccacggattcgacctcttcggaatcgatgagatagataaccttcccagtcgacccctgccaggtcgagatcaacagtagggtcacgttccaacgcgaatgcggctgaaaaaatgcctgacgactgagcaaaaggaaactgagctggggacttatcctcacctagatcagcgacacaagcagcagaagagatcacttgctcagaatcgcgtgggtcagcgccggcataggaggtggcttggtcaactacatggcctgtagaagaggtacgccgctggagatcgcgtgggtctgcgtctgcataggaggtggtttgataccaacccggcagacgcatgtccttgaacgaatgccaaatcgatagcttaaatggactttagtaggggcgaagtagctgaggaaggatggagattcgagggggggggtcagcggacgcactcttggaccaactttggaagtgaaggcagtgaaggcagtgctgtttcgtttgctattttgagaaagccaaagcggacgagtatactgagcctcaagggtgcattttggccattatcaataggtgaacagtagaaacaacgatgaattcaggttaaggcggaagcactacccgacactgcttaattctcgggctacaagttataagtgataagttaacccacagcagcgaaatcgggtcaatcgtgctgctgaccctaagcatacgaatcaggtcatgtgtagatgacccactcaagtcaatgtgggtcactggttttgggttttctaattgcctattttgaggcgttacctactgtcatctgtttacccaaatgccctggttgtaacgagggccctcccgatgagggccctccttagcaatccccggatccagtggtacctcaagtttcgcatggggagatggggcaatgtgcagatccagatggagagacggtgcagaaatccggtccgacaccagatccaacgactaccatagatccaaggcaccgggatgctgatgcggatgagcaagtctgcgaccatgtgagcggggatctgcacgccgaagatgttgaagcagagatggcggtgctacccgaagtcacctcgaccacagaccatgtgaccattgaagacatccaggtgggagatccagatgttaacacggtggaagagatcgatcgacttcgacggcggatctggaggcactggcacctgctgattggcaaaggcaacgcgctgccgcccgcggcacgaggagttgtgtgtgacattgatgtgggtgatgcaaaacccattgctcagcgggtgcgcaaggaagccgcgcagtaccatgagaagctgtcggatctaatcaagggtctacttggagccaagatcatcaagaatttgacttcactgtgggcatctccaattgtggcgatcatcaagaagaacggggtggacatacgtttgtgtattgattaccggctggttaacagtttgacccggctgatggtctacccgatgcccctgatcaacgacctgcttgaggatctggacaaggtgctttggtactgctctttggatatggccagtggattctgggtggtgacgatgacggatcgggctcgtgcgatctccgccttcatcaccccgttcggactgttcgagtggaaccggatgcccttcggattgaagaatgcaccccagatctatcagcggatgctagacaacgcattgtatggattcactcggatcccgcggctggaagatggatcgggatcagagcgcgaactcggatccaagcgtggatctggatcggaggcgttgaatctggatctgaagtcgggagaaccggaaggtccgggcaaaccatccgtactgggacgtcggtcgtatattgacgacatcttggtaaccggtggatcctgggatcacctgtgtgaacgtgtggacgcactactcgactcatgcgataaatagaatctctcgattagcgtggtgaagagtttctggggcaagagtaagatggaatacctcggtcatcgcgtgtcaaacgcaggactggaggcgaatcccaaggatctctcggcactaacggatccgaccttccaaggcacgcttagatccatgcagtcatacttgggtagtttgaattactacagtcggttcctggaggactacgcgatttacgctccgattctctacgagctacgtgaagtggactacgccgcgatgagcaacccggagaatcaaggccggatccaagcggtgatggcttccacgactccagatccaacggagcagacctcgtctgacatggtggatctagacttaccggacccgaactctggatccaccaaggctgtgaaacagaagacttcgaatcaggaggcgaacgatccaagcagtgtagatccgcgttggattagcgctcatcgggaatttgccaaactaaaagacaagatggcgacgactccgatcctccgacacttcgacgcagacctgttgccggtactggtcgtgtacgctagtgagtgggccatctcggctgccctgatgcaggagcacgacgggatccactatccagtaacgttcaccagccgcaccctgaagtcaaacgggcttaactgcggcgtggttgagaaggaggcgttggctctgttgcggatcctggatctgggttacaacatgttagttggacgctcgatccgagtcttgactagacattcgacgttggcctggttgttcagatccacgggcctacaagggcgattgggacagtgggcaacgacaacgcggaccgcgttgtcgtgcccaatgaccatgacctgcgactcaggatcatgtacgagtatcacgatgcaccgactgcggggcatccgggccgtgagaagacataccttcttctcacgcgatacttctactgggcccaccagtacaaatgggtgcgcaagtacgtccgtgcttgcgaggtttgtcaacgtgtgtagcctgcgcctttcgcgcaggctcccttgcagtcactgccgactccgtcggagtgttggcagtccatgtctttggactttgtgttcggtcttcccccggacagccaggggaacacgggcgttgtggtctttgttgaccgcttcagcaaggtggtacatcttgctgcggtacccgctgaagtgaccgcgaaaccgacggcgcgtctgttcgttgacatggtgttcaaacaccatggcatgccgatcgacattgtgtcggatcgagacccgcgcttcactgcacacctttggcaagaagtgtttacacttcttgagagtcaacgtcaactttcgatgtcgactgcgaaccatccgcagacggacgggcagaccgaacgcgtgaaccgcgtgctcgtagacgtgcttaagaactacgctcactcgttccaacactgaagcgagtgcctgccgatggcggaattcgccatcaacaaatcggtgcatgcctcgactgggcatacatcgttctacgtgaatgccatcaggcacccacgcctcccgagtctactcgggatagtggctccttccttaagtgggggaggatctacgactgcaacgcagcagccgcagaattccgctgacacttgcacagtgtcagccgcgactacgcgcaaaaagaacaagacgcacgcgtcaagagcaagaagaagaagaagaagaacgtgtctgtgaagggcacagacaaccgcagaggccgggcctactgctagaaacgagctgaacgagttcagctcggacgcaatcaacttcgtgcagcgcagacaagccgtcattcggtttgtccaagacgctattgcagcttctgtcgaccgacagaagctgaacgcagccaatgttggtaggggaaacactaatgaattcaagaagggttcattggttttgttagcaactcaaaacctgcctaaacatgcagtttccgacttcggggcatgcaagctcgctccgcgcttcatcgggccgttcacggtgttggcacgacatggcaacgcctacacgcaagacattccatctagcatgcgcctccatccgaccttttacgtcgggcggctgaagccataccggcagcacgagccacctagctcggctgaaccgaaacagaagactcggcggaagccgtcatcctcaccagcgcgaagtcgcgctggagcagcgggtcgagctaatggtccagctcggccggaacgatcgaggcggcctgggaggccgccgcaacctgaggatacttcagagcgccgaactcagcgctctggaactactccacgaccggaacttagtcgtggggagacgcgagatcagggtcaacaccaagttgaccatacacggggcgtgtttccaccaccaccgccgccaattcgtgacgcacacggctcaagtcgatggattattgagcggattgttggtcacagtatcccgagaatgaacaggcaaccggttcgttttcgtatccgttggagaggattccctcccaaccaagatacatgggagccgcggacgtcttgctcgaagacgtcccggacatggtgaaggcgtatgaagcccaccatgcgctacgcgctggaaagcaatacgagcgctgttgttaacaacagcgcccgaaggcacttcaagggcaggcagtgggtcctgcccccgcggcagcgacgcgcttcgcacgtttccgcggatgctactcagcagcagagaggttctccgctgatgcgccagcggtcttcaactttgacgcgctcgttccattacgagcgcgctctcttcagcgtcacgcattgaccaagcggtcaatggtggttgacgtgccgtgactcggcgcgtctaaccttgaggggggatggtgtaacagtgttacacgcgcaagtggctacagtcacctgtaactctaacagacacgacgtctgttagaggttcgaaagactttctcgaccttggtgtagatacaccaaatgctacatacatttacgaccaccacgacgggtggtccatagagacttaggattcctattggctgaaagcagcatcttttagccaatgagcgacatgcatagcattggaattctgccaaccagccgttggcagattcctatcttagaatattacatttagaggaagtcagaaacataaaacaaaaatagcagttctcatcttttaccaaaacacgctacttggagtctttatattgtttaaagtatactcgtggatctcgagtatacttaactcaagtaaaaacctacgcttcctcatacacgtgcgcatacgtgtaagccgtagtagtgagccaaggtaggcccattacagtagtcaatacagagtctgatgtcgaccccgttcttcttgacgatcaccacgatcggtgatgcccaaggggacgttgagatcttgatcatcttggtcgacaggagccccttgattagctgcttcagcttttcgcggtactgcggcgccgctttacggcaacgctgagcgactggcttcgcgtttccgacgtcaatgtcgcagatcgcaccttttgcggccggtggtaaggcattgccttttccaataagcaagtgcttccggcgccagatgatcttccgcagccggtcgatttcctccggcgtgttttcgccaggatcgccaacttggatatccgtgatcacgacttcgtcagtggtgaactccgggagcactgccatttaaccttcgacatcttccgcgtagagatcaccgccttccgtgatgcagacttcaggatcttccgggtcaactgcatttggacgtggatcagcttcaagatcacttcccgacgcgtgtttacgcgtctcgtgactgacgctggggctcgctggattttcgtccgtttcgacccgtcgatctcgattagacgcctgatttacgcctgtcgcaccaccgtaatcatgatgagacgcctaatttgggcccgtcgcaaccactcgatcttgatgagacacctgatttccacccgtcgcaaccactcgatcttgattagatgcaccatatcgcaccggctggggccggtcgcagccttgatccttcaaacaatccgtgtcgcaggctgtatttccagcgtcgtaatcacccgatggtctctccgccccctgcgaagttgcgaaaccatggcgcgtttctccggtgccgagttcgtcgctgttcttgggctgctcgtccccgccgggcgtcgagtgagacgcggtggggttgccgcacgactcttccgggttggaatcgtcggggcgcttggacgccacgcactcggtgcgcaccgtggccacctctgctctcttcgctggccgggtcaagatcgccgtcggcgttgtgtactgcggccgctccacaacaggcccctgcacgtcggcgggctcagacacgtccttggtagcgtcgatagttgcttagtacgccacgttctgccactccgcgtacctgcgagatccaacggagacatacccaggtaagcgcggcactcgatctccggtcagccacatcgcgagtcgcgtaccctgatgcagcactaactcgcgatcgctcacgtttgtcagttgcaggtagcggatcttgcccgggacaccagtcacgctagacacccaccgatcgccgcgcgtaacccagagtttctgatgctctgttgatcttgtgcgcagctgttgaaatggacagtttacacagagtaggtagctcactacaatgtatcactcttttggttatcctctcttcctatgactactactctagatccgtgctcggtacctggaggaaaaagaggaagtgagctcgtcttcggattgcgtcctcgactcctcactcctcggcctcgtgtcgtcatcgcactatgtatggttggcaggtagctctctgcctgcactatccagaccacagctggcgatctgaacttctctcgtacttgctaaaacaataataacatgtttgagagggtttgctttcagttgcaaaataactcgactggcagacaggcgaagcctgctgccaccctgcgagcagggcgcgctcggcgcgcctcttcatttaacactcccactaagtactagggtaaagtttcagatctcgcactcctagtttctcttttagtttcaggaattgttttgtggggagagtttagtgagaatatccgcagtcatctctgttgtagagcggtaagctatcttgaggcggccaagttcaacgaggtccctcgtaaacaggtagcggatctcgatgtgtttgtttgctttgtgattttcaggatttttcacaatgctaatggcagcgttgctgtcacaccatacctgcactggtaccttttgaggaaaccccatttctcccagcaagtgccacaaccactcactttctttagctccctcacttagtgcgatgagttcagcttcagcagtacacctccctgcttgctactacaccatgacacactggctccggccatttggattacgtaccctgttacggatttacgttctttaggttgacacgcgaagctcacgtcaatgtacacttcgtaagtcacgcctctcgtttttccatcgagaaacagaccgtacgttgacgtccctttcaagtatttgagtactcgcctagccgcttcccagtgcgtgcagttgtaacaagacagaaatttgctcaattctctaaccgcgttggcgatgtccggtcgtgtgccacggaccacatattggagtgatccaacaatgcctctgtagtcgtaaggctgcgcagcaatctgctctgcgctcatattcgtctctggctcgagtacgaggccaggtacttgcggtgtcatcaccggcgagatatcgaccagtttgtacttcgtgatcagctctgcaatgtacttgcgctgtgagatcatcatcacacgctggttcctattacgagttacctccatcttgaggatgtagtgaatgtcgccaaggtctttcatcttgaaccgttttgacaactcggctttgagcccatcaattagtcgcatgttccgcgacatgatcgtcagatcatcgacgtagaccacgactatgatccaatctactcccactttttgcacgtagatgcaaaactctttgtggcagcgtgcaaagcccatcgacgtcaaaaaggtatgtaggactttataccagatgcgcggggcttgtttcaggccatagatgctcttcagaagttcacagaccaagtgctcttggcctcgcttcgcaaaaccgtgaggttgcctcatgtagatcttttgctctccttccatcgtgccgctcaagaacgccgtatggacatccatctggtggatatgacagtccaatatcgtccctatcgccagcactaggcgcagcgactcaaatcgtgccacgggtgcgtatacctcatcacagtctaccccaaactcctggtggttgccctgtgctacgaggcgtgctttgaaccgctcgacagtcccgtcggcgttatactttactactagtacccagtgacagggcaaagccttgcgtccgggtggcagttttacgagtctccacatcccattctcgatcaaggagtcgtactcaagttccagagcttgtttccattgctctctatgaggtccacttaaggctgctttgagcgaccgtggtgtcggcactttgtggtctagtatgtcctgcgcaatgttcttatctagcatcgcctggaagcactgctagtccgcgtatctcttcggcttcttcgcctctctacgtgggcggggttcacgcctctgtggcgtatcgacgagtcccacacgttggcgtttcttttgagctcccactgctgggttactgttttcagtagctgcttcagctcccactgcctcagtagacccctgtgctcgtgattcagctcccactactgccgtggacccgtcggcaagtgcttcagctcccactgcctccgtagactcggtggctagtgtttggtttccctccgctgcgggtggctcgcgcgcggcagattcaattgtgaggggctcttcggcctggccgaaagctcgctgaaccatggtggctacattggtcgtatcaaacagcacttcacgcgataagatgtgcttgttgttatacatgtcccagagtctataacccttcgtttcctcagatattccgagaaaccggcactttacggcgcgagcagacagcttttcgtcctttcttagggcggcaggaacgtgcgcaaagcacacacatccccacacaggtagcttgctcacgttgggaggctccccatacaccatctcatacggtgtcttgtttcccaaacgtgccatgggtgtgcgattctgcacataagtcatgtacatgagcgcctctggccaccacctgtgttccatagctgcgtccttcaacgcgcaacgaactctatccagtttgctctggtggtctcgctctgcagctccgttttcttcggggctgtaggctggaatacgatgcctttgcctttacagaagcttttaaaggctgcattcacaaactcagttcctccatcggaccggatccgacgaatcgtgaactttccctcacgctcaagctgcaaaagtagctcctctactttctcaaagccttctttcttactgcgtaggacgtaggtccagcgccacgacgtgttgtcgtcaatgataatcaggaagtatttgattttcccgcagctgccatacacccctatggtcttcatggggccgtttgtgtccatatgaatggtgctgattgggttctcatctctcgagctcttcgcattccggtaggacattctcctcttcttcatctctgcacaagttgtgcaaaagaatgggatctttcttagacctggcgcgggaaattttggcattccagccaccacttttgggcttaacattgcaattaatgcatccttattaaggtggcccagcttaacatgccactcctgcagtgtgcgctctaacctctcagtacctaggcgagctagtggtttacagggctcctgtttcactgcgttgcacagcagttgacgctcttacagtgttttattctgtatatagtatgccccgttaattgcttttgcaacaaacactaattcattggcaaagaacacaaatttgtactcgccagttagggagccaaatatctggtacccaccgcgcctgagccagaactcgctcagaatgttcgaggtagcgtccggtactaacgcaatattttcgaacagaaaaggtctaattccttgtggaccatgcaaatacaattttatcgtaccaagatgtgtatttgaatgtttagagccctgtgcgaatgtaaacatgtactggttgttgggctccttctgcacaaaccgcgctgcctcgctggttagtccgtgcccgcaccctgagtcaagtacccaagaatttgtggttagatacgaatcatcgtctaacagaaatggatacaaacttcgcacctttttctcgaggtcagtcagcatgccggcgaagctcttcgtcgcctcggcaatctcttgattgctgccctcgcttggctgtccttccatgtccacatcgtcgtccaattgcttagcggcggctggagccgtgcccgaagcgtcagctttcacggcgttgacgacgctctccattggctcgtcttcgtcgctcatcggcgaagcaccctttcccggcgtgtcaggctgctgaaagttgcttgggggcgggctcgtgtacccatccggggtcgcgggcagcgaatcttgctgcgcgtcgcacgcgtctaccgccacgactttggccaggcactcagccaatggaatttcacgacgctccttggccttggccttgccctttccattgcccttcatcttgggtgtaggctcgtgcacttccttgcgagccgtgcggctggggtacgtccacacgttgcggcgaaacacacccgcagccctgtctgcgcgacgcgcggggcagtcaaacatcttgggtaggccaatgccatcccgatcgttgtgcgcgcctgcgcagtagtggcacttcatgtacccgacgttgtagtggacgtcgttgatcggaccgtctgcggcctttcgcttgcccagaacggatcccttcggatttgttggagccgtcgtggctggggtcgacttgacgtggttgaccaccctgccgctagccagcgccataatttcgctcttggtcttgttgccaaagacgttggcaagcttctcgctcaccttctccagcgtgaagctctcctccgtgaacttgacggaggagccccacatgtgcctcggaagcacaccgagcaccatgaccagcatcatcttcgacgtgatcatgtgcgtgtcaaccaggggtgtacttgaaatgttgaaatgaacagtttacacagagtaggtagctcactacaatgtatcactcttttggttaccctctcttcctatgactactactctagatccgtgctcggtacctggaggaaaaagaggaagtgagctcgtcttcggactgcgtcctcgactcctcactcctcggcctcgtgtcgtcatcgcactatgcatggttggcaggcaggtctctgcctgcactatccagaccacagctggcgatctgaacttctctcgtacttgctaaaacaataataacatgtttgagagggtttgctttcagttgcaaaataactcgactggcagacaggcgaagcctgctgccactctgcgagcggggcgcgctcggcgcgcctcttcattcaacagcagcttcacctcaacggatcccgctatgtcgatctcgcggtaaccggtcaaggtctcctgctccaccttggctccgtagagcggatgtctcccagcgagctggatccgcacttcgtctggcaggcaagatcgaggcggatacccgccggtaccatgaagtccatgccgaggattaagtcctgaccgcctgtcggcggacccacccaaacatcgaaaaatacacaagtgatccagcgagcgtgatgttgacccgtgcacgtccttccgtcatgtatggagagtttccgacgccttcgcactccaatgtctgactttcgtcaatgtagcaccccaccttacgagcaaatgcggtgtctaggatagacacttcggcaccactgtcaaacaacagagtagctttttcgttgttgatattgcccacagctttcgcttgcttgaacttcttttcaggcacatggtatttccggtaaccacgcgactcccccaacgcgatatccaaagccatcttcacactcgatcttgagtagttatcaacttggtgaagacttgacatggcagccgtaggtttcttttgaagatcacatgtatcatcgatgagtttgcttacagtcgactgcgactgcttctcgaaatacgcaaagatgcagaactgagaacgctcgtctcgtaccggaatccaacccggcgagcgtcctagtttaacattttctccgcagactcgggcaacatgcctccgtgcttggtgggattgtaccactggcggatcaagttgtaaaattcctccatcggacagcttccttcgtcatgaatctctccgcaggccttgcagacaaagagacagcgatctgatgggtgaccacgcataccgcatttttcacacgtcagccgcttccagcatcccagattgccgtgtttggtagacccacaatgagtgcaccgcttgaggggcggccccatgtcgatcgatttagagtgatgtcctggtcgacgatcttgacggcctcgatcttgatccggtggacgccgatctcggccggccgagcgatgttcagtcgttccatgatcgttactggctgaagtcgcgtacactcgacgcagatctccctcttcatccgagtcgcttgatcctgcatccaagtcgctgctcagttggatcaccaaaccgacactctgcgtcaggggagtttgatcctgacgacctcgatctcagtcggcctatccgcgcggtggtagcaacaacggctactgcttcgcctggaggaactggggcgcaccacgcattcgtgtgtctgcaatgtcggactgaaagagttttccggaaaggacggcgacgaagatcgagctcgatcttgggtcagcaaggtaagatcggctttcgtccgcgatcaagcacctgatgatgagaagtgtctggcgttcggcgatttgctcagtggtccagcgcgaaactggtatacgcagctgagccgaacaactcgcaccacgtggaaagacctgctccagagtttccaggtccagtattgtgggcgtggtgtctcggttgcccgccagtactaccatgctcggaaacgatctgacgagttgcctctggagtacctccacaggctcaacgtcgcaggcctgcggacacgtctacaagtcacggacggaccgcctgacgtgcgccgggaacatgtggaacactttatcgagactttggatgaccgcgatctagcgggccagcttgccctgcttcggattcccgacgcggacactctggaagaagttttgcgatctcgccagcgtgccaaagcgcgacagagcaagacggtgttcggctcgattaagccccgcccgaagccgcaactaccgacggaacagaggaaggcccggcaacggacctagacgaaaagcctcaacctcctccccaggtcccctcggggacccccgcagggcacgatgcgaatcgtgacctgccggatgaaagtccaccggcgcaagccggaacccaaccacccagcgctagatcgaccaagaagaagccagcaagatcgaagtcgtcgcggaagaagatgaaggctccagactccgatgctgacgatcgagccgatctcacactgaccgtggctgaggaccaactggttgtaacgtactacaagaaggagctgcacgctttcctgcttcaggacgatgtgatgaagctcctccggccaaagctcctcggcgatcttgcgggaccggtgtcacagccgacccctggatcggacaagttggatgccgttcagaccctgctacggctcttcaaggaagttggtatcatcgcaggagtgctggatgcggaaagcctgttcgatctgaagctcagcacgatccagaactcggcgcagaggctgttcctgctattgaagccgttggtcggtgagtcgagtcgatccttgaaagaaacatcaagatcgccccagacgctatcgagatcggcacccccagatcgacgcctgcgcccaacccgggtggccaaactaggctttgccgatccgcggatcgatcatgtttcagcagcgtcgacggcgatccgatctctgtcgacgcttcattcccttgtccaaactcggcttgcgcatcctcttggagggacgcacggtgaaatcccgagtcactcaaagatccgggcacgacacggcgcccgaactaccgtctaacggagggggtactccgatcttccgtgaagttgctgatcctcaccttgtgtacccatcggtgggctggatcgctcttcgggatctcgagaagacgcgcttggggttgagtcttggacggtctggcgggcagcgggaacttgtggcagcaacgcggatatgcttcacgctgtgacggagtagttgtggcggtttcgatctggggttgtctagattgacactcgccggccaggtgtgatcttggcctggggttgccttgtggtcggtgtatggccttcctttcctttacttgcttgccgcttcctctagcggtggatcgaagtgagggttgtcggacgctgggccaagctatcctggcgtccgaggttccttgatcttggggtgtaagtcgacttgcgtagcgtcgggtgggccaaagtatatcacgtgcccggtattgcgaaggcaaagaccacttgtgaagaaggaggtaaaatcaactctgtttaaaatgttagcttgtcctaagtccttgtcctatcgttctcctgcactcctgcgctcgtgcggtctgtgcgcgtgctctctcggtgtctgcgcaacccgtgcggtcgacatcatcactctttctccaagatcgcgtcatccccgccaagatcgatatcgtcgacttggatcgattacgccggggtttggctctcaagcacctccagagacgttgttcaccttgatgttgcccccttgaccttcttgctggttactatcgtgccagactacgcgtcgccacgctttgccgatcttggtccacactgtcgatcttggccatcttgttgatcttgggtatccgcgcgaaaatatctccatccactacaccacacggtcgatcggggaagtccctgaccaacttcagcttcgaagcatgcgcgatcggaaacaggtgatagtccgtaccagcgacctgaagcttcatcgtgtactcgttcaccttctccgcaacacagaacgggccgtgccacaggtgcgccagcttccgggcataccacgatccaggtacagccacacctgagatccagcctcgatcgagtgtggtcgaacttcttcattgtgtcgatcggcccgatccgcgatcgcctcgcgtaggcgagcattcacttgacttcgagcctgatcgtagtgcctctggatccgataacgccgccgtcgaggattccgaccccgagtccgagtactaccgaaaggtatcgtcgcctcgagcgtcgatcgaggatcccaaccatgcaccagataaaaaggggagtccccacggactcgatcttgagccgtgttgatcgcgaaggtcaatcgctctgcgtactcatcccaatctctctgatccagatcgtccacgaacatcttcagggctcacgtcgccgtctgtgccattcgctctgcaggaccgttagcttgaggtcgatatgccatcgtcgctcgctgacgcatacccaggatcttgttaaaggcgcggaagaagtcagccataaatcccggttcgcgatcatgcctgatcacctcgctagtaccaaatcgccggaacacgcactcttcgtaagactcggcgatcgtctgcgccgttcgggacgaactggccttcgcgatcacgtatcccgtgaacagatcgacctagaccaacagttccgtattacccttgtacgacttcggcagcgaaggtatgtgatccatcgctatgatctggaacgggtatgtcgcctggatgttccccggcgactcgcccctgatcgtgggtcatcctttgccggtctcgcagtcgacacattcaccgacgtacttctgcacactcctgaagagacctcaccaatgaaagtgatcgcggatccgctgataggtacggccgatcccctggtgtccaccttccagagtggagtgatagtgattcaagatgtcttgatgcagcgtctccggtgccaccagtctcatcagtccatcccgatctgcctccgatcgcttggagggtgggcaatggaacagcagattatcaccgtcgatctcatagtccgctgcgatgttgccataggatcgaacctcatcctgtgtcagatcagccacatcttcatacccgcgaccacgattcttcatcctgtgctcgacgaatccgatcaatccgcaaccctcgcacaaactcctcctgcatgacggtcgggttcggccgtgatctggtgcccgatcgggtggtcatcggcgatagtcgggcgatcgactcatccgatcggacgaccaggatctcatcaagtcggttcagtgtcactagattcccatggtcggcatcatcctcgacgtcgacgcccccttcacgttggagtgttgcactggccaggctgtccgcacttccgttccagtctcgtttcacatgaaacatttcgtgatctggccacttccgtagttgatccagcacctcctgcttcaacaatgtcagctttggtgctttgcagtcgatctcgccccgtacttgtcgcatcaccaggttggaatcaccgcagaccactaacctgcctcgatctatgccgtcaaggaggtcgaaacccaacaacagaccatgatactccgcctcgttaacagtcagcctttcagcatagcccgatcgtgccttcaccacactccattcgggtaacttccacaagatcgcactgtacgcacccccgcttcgcttgacgcgggcagatccatcgaaacttatcaccagcagctcttcgtccgcacgtacagtcgggatcggggcctgaatcttccgccggggttctttcttcggcgtgatcgcgatcaacgcgtcgtccatatccgatcgaggcgtaatactagcggcgatcgcccccaatatctcgtcctctcccttggtgcacttcgtgacctccagtgtccagggcgataggagtgcagcccactgacccaatcggccttgaagaccgggtgatcggaacagccacgccaacgtcgagtgtcgggtgaagacccggatcgatcgtccaactagcacgttatagttcaggtccaggatccgtaacagcgccagcacttctttctccacacgttgtagctcaattcattcggctgtggtgtaggaaacaccagatttcgcgcgaccaactcggctggagtggtacactgtaccggtagccgagctcagccgagttcaccagcttatccggacaccttatccggctcagccgagttcgaagaattgtccggatagctcatccggaccagccgagctcaggtgtcgccgagctcagcgaagagttgccgagacccaaaaccgcccactttcatttggtatttgtataggagcttaggaatagtggaggtgccccttcagggcgcccgacagagataacaaacaacagagcagaattttctaggtccacaacacgtgaacacgttcccgtaagtccctgcacggggccggattatgtctgctgccggtcccgagaggcatagcttgtagggtactcggctggcagcgccaagagattaaggtcggcccgggttgggcgcgagtctcgccaagcgcgagggaaagtctcgccaccgctgcgagccggtgttcccgtacgtctcgggcactgattgctgagtcgagaagcctttgctctcggcgacctgtaaaagcgctccgtgcgccgtcgtccatcctttggtagagggcacaggttgagtgaacggaggccgtcgaactcggcggttctccggaggagtgatcttggttggcaggtctcggcgagaggcgagacacccgctgtaccggttgggccgaaccgctcgggggcaacccggcgcaggccaacaaagccgaccagctcggctattgttgtgtttgtagccaagttaccacaactgacgattttgtgtgtactgctataccacaactggtgccgcgacccgggaacaggggtgtgcttgtgtttcgtaggtaccagctaaccaaggtttgagaagaagagaagagaagagagtgtgaagatggtcatgggaatttttacgccgagtccagcgacggttggaagtaactcggctggactgaccaactcggcggactcggcgaatgcgatgatcacggacgcgacggcggacgaggcgcgcaccgtccagttcgatgaggaggatgcccaagaccaagaaagtgaggaagatgttgtggatgagtatgaggagaaagccgagctactcggcgaagtcgacgagttgtcgctgcaaggcggacgaatgggtaccccacgtccagttgtgcgcaacctggcggccgagctcggcaatgatacggacgacgaagatcaagccgccgctcaaggggaacgtccgcccctgatcccgcgagcgacgaggaatgcggatacaccaagtgcgaacaaggttctgggcaggctcggagaggagatgtgagctcagagcgagtggatgatgatgtttgccccagtggcgatggctcaggcgagatggccggtgctagggcccgagctgactcagccggtgaacagcaccgacatcaaccaactggtcgaagacacggtgctgctactcaaggcgatggggttccggtgcacgagccgacccaacagcctgctactcggcgattgggaccccagccgagcttcacgcgaaatcctcaagtggaagcgtcggttgagagtctcgtttggtctcgagcggggggccgtcggaactcggcagactattgcgaaacgagtggctgatactccgaagaccgtcgaagaccccagcaggattcccctgccgaagactcccgaacgcaagagagccgaggtgttccgctctactgaggatacgccgtatttcgaagattcgcatatgaagacgccaacgcgtggcaagcagccaagtggacgctacgctgagtgtttgacgctgcagacgcagccgagctcagcgacagcgacgatgggcgcgagtacctgaacccggctgaagagtcggtgaaggacgtcatcaagcaccttagcttcgatgacgctgaaagtgatcggacgcaatacttggaggttcgcacccatgcgtccctcgacaagatccctatgttcgaaggcaaacgttaccgaccggatgactctctccagtggcttaagcgattcatctacgagatgaaaggaactcggctggcacaagacctctggtacgagccattctcgctgaagctggagctaggcgcgaagagctggtatcgccagctcccgaagaaaacgcaacggaagtggagtaggcattcgccgactactactgttcgcagtttgaccagtcggcacgagctcgctattactcggctcagcgcaaagacaacgagctggtgtgtgacttcctcgttcgtctcaacggatatgcgaagtcggcgaaaatccagtacgaggccggtggagcggatgctgctgaccatgtggaacacttcctattgcactgcggagatgatgacataatggatctgctctagccgcaacagctcaccgacatcaagaaggtcgagaagatcatcaaccagaagatcctgggggagcgccggaagaaacagcgcgaccgtctcatcggaagccgcagccgagatgccaagcgcaccgattcgccaaggcactcggaagctcggcggagtgagccgcgtcgagatgaccgccgagacgaccgccgggaacgacgcagagatgaccgccgggatgaccggcgaagccgacgcgacgctggtcgagaccgccgactagcgacagcgctgctggaggacgacccgtgtgagctggctgagagacgccaatccaatcggcgatccaacctctacgactcggacagcgatcagagcgacggcagccagccgagctactccgactcggctgtagactcggaagacgattacatcgacaccgggttcaccagcgatcgcgaccgtagatcgggggaccgagggaactcagatgggacaccaaggagtgatcaccgaaggggtcagccgagctcggctgaccgcgccagtcgaggatacgatcggcgtgaccagactgggcgctgaacgcccttcgtatggaccttgtgctgcctgcggtggtgcgaaccactccgttcactactgccgccgtcgctgcaagttctgcaagcaattgcacgatgtcggttaatgcgagctgttccagcgctatgagaagctcgccgcatttgtcaagtccaatgtcgacaagtccaagttacctgaagacctccaggacctctacacgccgagtgatttaaactcggcggcccgccaacactgactgggttggatgataccgggctgccacagtcagctgagccagcagtagaggcgaactttgtgtttgcctttgtgggtgaggcaggaaggcccgaggaccgaggagaagacgacgtattggattgtgaaagcgatggacttgatggtgagctcggcgagagtggagaagaaagccgagcaagattgtgcagtgcagttgcgactcagcgatcgacggatgtgaccacagccaccagagttatgaagctgctccctggggagcgactcggctggtggtcgtcacaaaagtttgaccgccgagttcggatgagagctctcgttatgggagcagtgaacgaccaccgtacaaagatattgctcgacaccggtgcgaatgtgtcggcaataagcgaagggttcgtgaagaggctgcggttgaagcggttcacacgccaggaccgacagattggcgttcaagttattgggaaaggcaaagtggcgacgatgtcacgagcgatggtgaaggtgacgctcgactgggaggtcacgtatgaattttaagtatggatcctcgatcaccacgcgggagtcgagttgattctcggtacggacttcatgattccggctgggatccgcctggatctgtacaactcggtggcgaagttgccagatgaagttgtcctacctctcgtgaggtcccagaactcagcggatgaaccgaagggcggcctctacattacagacggcccgaccgaaccggtgaatctcgagagccgagttcccgctgagttcaggctgatgtggaatcaaccgagtgatgaaacacatggcttctgggtacgccggactaaggactgggtaccgaccgtggtattcgaccggcgtaaccgagtggctcgagttcgcctgaccaaccttaagccgacttggacgtggtgcccagcacatttcccagtggttgcctgggcgccgcatggggtgttaccgcccgatagttacgtcaggctgcactcggcgaagtacaaagattggcaagtcatggcctacgaagcggctatggataaggatctgctgcaaaaggaacaacagctgtacgccgagtggctggctcgacagccgtcagctgtggaccgtagaagctaccctgaaccgaaaggggtgactacgtggccgtctaccaagcagcgggattcggcactgacttgcgcccagcaatgggagaagttagccgagtcggaggagcgagccgaggcagaagcagtcgatagtccaccctcgactctgacagagccagcgaactcggctatcgctaccctagcgcctgaggaattagcattgagcgcggagcctactgctgacttggtcaatggcccgcctagtcgagcagagatcacagtgacggctggtcaagaagcgcccagccaaaacgcttgtgcagcagatgagtgtgaaagtgagcaatccagcgatttgtctgactggacgatccgggcccaagccgccgagtccaaggctcgaagatgaggtcgatatgagcgacgagcccatgtcgtcagacccggaggaagacctgcgcttacgttaccttctggcagccaagtacgaggaagaggcagatggccgaggcgactcggtgggagactcagccgagttcgagcaccaagcaacgaacttggagctcgaagactatgctcgcgagttggcgttcctgcccgatctgactgaagcggtgtcgacgccactcgactatgaagcgccaaacgttcggagctcggcgcacactcggccacagtctactcggctggtggaagtattgaagagccatgaaaagatcatgatctccagtggtaatgccctacctccaccagcatacggcgaagtgtgtgacatcgacgtacaggggcatccgccaatccgccaacgagcccgccgagttccgctgaagcatctcggcaagttgtacgagctgctcaaggcgctgttacgggctcggctaattgccttctcgaacagcccatgggcatcacccatcgggattgtcctaaagaagaatggggtcgacattcggttgtgtatcgactacaagctggtaaacgcgattacgttgctcatggagtatgccataccgctagtggacgatctcctcacgaagttggaagcgtacctatggttctgctctttggatgctgctagctgtttctgggcggtcatgatgactcgacgggcgcgttggatctcggcttttgtttgcgcgcttggccacttcgagtggctgcggatgcccttcggattaaagaatgccccaatgatctaccagcgccttattgataacgctctgtggggttacgtacaacccaagggcggctggaatgtgttcgccaagcgcatccaacaagcggaagccgcctcagaagctcagcggaaacggctcgcagccgacatcgactttgaagccagtggccagaccaagtttgaggccgaccgccgagctcaagctgagtttgacccattggaagaattcattaacagcccagaagccgacatgttccggacgggtgaacctgatgaatcgtgccttacaccggttttcgaccggcgatcgtttgtggacgatatctgcttcggtgggaggacgttcgacgattgcttggggacgcttgaccgattgctgcaacgcttcactgaatgccgcatcagcatcagcttcccgaaaagcatcttcgtccaacctaaagtcgacttcctgtcacatggggtgacctcggctggaatccaagccgaccagaaaaagatgctggcgacagccgggctaccgttccctacgacgaagaaggggatgcaagcattcttaggagcgctgaactactacggccggttcatccagaacctggctgtatatggggcggtcctctatcagctgatggacgaagatttcggacctggcggtgatctgacggccgcaaaagcggcgttcgccgagttaaaacagcaggtggtcgacgcacccatactccgccacttcaactcggctgaggacgtccacgttatgctattcgccaatgagtgggctctgagtagcatgctgatgcagctccacgacgggaagctccatccagtgcggttctgcggccgagtcctcaacgataatgaactcggctaccatcccgccgagaaagaagttctcgccttgctacagcttatcaaggtgtgccacacgttgctcgccgggaagaccatccatgtttacacccgctactcgactctcgaatgggtgttccagtcgaagtctctctacggcagagcagtcagctttgcggtactgctattaccgttccacctaaaggtcaagcgggtccgcgaacgggacacggatttcgcccagttgctccaagcgtccatcacgccggcagtgggattggacgagctactaacgcatgtcactccaccgtccaagaactcagctgtggtccgcatggacccagaattgctgtatgcgcatgtgccccgagacttcaaaagacacgtcctgtcgtttgacggatcggcgaagactgctaaacacggcgggttcgggagttgtccccgctcgggaaccgtcccgccgacgtgatgacaggcgtcccgatgactcgcgtcgccgagatgaccggcgccgccaagacacccgagacgggtaccgccgcgacgactcgcgaactggccacagccgtggggatcgacgggaacgagattatgagcgtcgtcgcgacgactctaggaacgttcctcgcgtggccctggctgacgcatcagtggaagacatagtcgctgaactgcaaggacgggacgtcaggagcacctcgaccggacgcgacagtacgcgccagcagttcagcgatgacagcgacgccgccagcgatcgaggctccgatgactcgtggtactcggaggaaggcggacacgatggttactcaacggatggcagcgatcactacgtggctgcggctaacgagagcgaacgacgcgcggcagccggcggcacgtacgccaggtccgacaatcggccttcccgacgcgattagagtggtcgggaactcagccgggacaaccgataccagagccgagatggccgtgacaatcgacgacgccagtacggtccctgcgctgcctgtggtggtctctcccactcggcccacttctgcaaccggcgctgcaagttgtgcaaacaagtgcacgatgcaggccgatgcgaagtgttccaagaactcaccaagcttgtccgcaacaaggtggacaagaaggacctcacacctgagctccagaacctcctcttcacggaacatttaaactaggcagcccgccaactgaaactgggttggtcccaatcgggctgccaccgttagccgcgcctgcagtcgaagcagagtgcatctacgcttttgtgggcaagtgcgaatggccggatgaaggacgaggtacatgggtgaacacgacggaatttgaaaaggagagaggcgaaagcctcggtggaggtgacttgagtgagaagagtgatgaagaagtgattgaagacactgccgaatactgggtgacgagtgcagtgcaggaaacatcgcgccgacgactcgacgtggaggtacgccttctacccggagagcgtatgggatggtggtcggcgcagaaattcgaccgacgagtacgtatgaggacgctggtgaacggagcggtcaacgactcgcgaacgaggatcctgctggacactggagcaaacgtcagtgttattttccgagaagtacgccaaccggctgagaatcaaggacattccagaccatggtcggtgtatggaagtccagggtatcaccaagggcaaggcgacgacgactcggagggcgtctgtgaagattacgctcggatgggagcgtgtttacgtttctgagatgtggatcatcgaccacaacgcaggcgtcgacgtggtgctaggcaccgacttaatgatcccggctgggatccggttggacctcttcaacgcggcggccaagctcccggacgaagtgatgatcccgctgaatcaagacgcagaacatggtcgacgaggccgaatgggtccatgtcaacgggggcccggtcgacgtgctgcagattcccggccgagaatggaaagagttccgaatgcaacggaaacgtccgtccccgacgactcacgtgccgtggatccgacggaccgacaagctcatccctacggtgaagcggttccacaagggacatccgcagcggatccgactgacgaaccttgacaaccggctcacgatctgtccggctcacacaaccttcgtggtgtgggtaccaatcgggtcgttgccgaagtctgagggatatgtgcggctcgactctgacaagtatagggaatggcaagtccttgcctacgaggccgcccgcgataagacgctgctcaagtgggaagccgagctttacgctcaatggttagctgcccagccgtcggcagtggatcgacccgagtatcccactccaaaagggctgctccgacggcctcccgaagactctcaagacgagcacagctcggagtcgtccgacagtgatggaggtgaagattctgacggcttgccagtgggcaatgatccagaatccgcaccagaagaagttgcgcaacggatagttgcagccgtcgacgactcgacaggggtgaccctcaatactcgagtggaagcagctgccttggagacgtctgagcgccctgctgggggagatgagtcgtcgggaaccggcttggacgaacctacggagtctaagagtgctgaggatgaagtcccgacgactcaatcctgctcgaactcggatatcgaggccggtttgacacgactcgagcagacgttcatgtgtgtcttgcgattcttgagcacagaaggtacagagaccgcgaatgacgacgccgctaactcgttcgagcatctcgcggctggtatcgggttggaagactacgcgcacgagctgacgttccttcctgacttgtccgaagctgctacgaccactctggactacgacgcagacaatgtgcggaatcctgagttgtcggcgacacgacaggacgatctaatcaaggtgctcaagaaccatgagccaattatgatcgcaagcggtaatgcgttaccaccaccagcatatggggtggtctgtgacatagacgtgcaagggcacgcgccgatcaagcaacgagcccggcggataccactacggcatctcaagaagctgtatgagctgctgagggggctgctcaaggctggactcgtgtctttctctgacagcccgtgggcatcgccgatcgtcatcgtcctgaaaaagaacgggatcgacattcgactgtgcatcgactacaagctggtcaatgccatcacagcgatcatggaatacgacatgccactcgtcgatgacttgttgaccgacctagaagcatacctctggttctgctcactcgacgctgcgagtggattctgggccatcatgatgacgctacgagcgcgcaagatctcggccttcgtctgcccgctgggacacttcgagtggcttcgcatgcctttcggcctcaagaacgcgccgatgatctaccagcgcatgatcgacaacgcgttgtggggtcatgtccagccgaagggaggttggaaggcctttgcggaacggatgggagctgccgaagccgaatcagcacgtctccgacgactcgagtcgtcgggatacctgcagaacccttccgcagcgtcccgcacgaagtttgcagccgctcacgacgactcgcaggcactagatcctgtcgtgctgctgatcaacagcccggatgcggacatgtttgcgaccaacgagcccgacgactcgtcactggttccggtgttcgatcgccgatcgtttgtggatgccatatgcttcggaggcaagagcttcgaagactgcctcgccacgctggacgggctcttgagccgatttgaggagtgccggatcagcgtcagcttcaccaagagcatattcgtgcaaggacgcgtcgatttcctgtcgcacgaaatctcgcgagatgggatgcgcgcagaccccaagaaactggacgcaatcacgaagctggcgttccctcggacaaaaaaggggatgcagtccttcctcggagcgctgaattactacagccggtttatccaagacttcgcagtctatggagctgcgctgtaccaccacaaggacgacgacttcgcgcccgggggtgacctcgctgtagcccgccgcagcttccaagcacttcagcagaaggtggcggcggcgccgatccttcggcacttcgataagaagaaggacgtgcacgtgatgctttacgcgaacgaatgggcactcagctcgacattgctccagatgcacgacgacaaactgcaccccgtgcggttctgtggtcgcgtcttgaaggacgcagaaatgaattaccatcctgcagaaaaggaggtgttggctctactccagctcctgaagacctgctatacgcagctagcgggacggaccatccgcgtgtacacgaggttctctacgttggaatggatcaccaagtccaagtcactcttcgggagagcggtgcaattcgccgtgttgctttccacgtggcacttgatcgtccagcgcgtgaaggagaaggactgcgtattttcacaactgctccagtcgacggtaaccaactttgtggacctcgatgactcgctagacctggttgctccaccaacgaaacgctcgccgacgacacgtatggacccaaacctcctgtacgcacgtctcccgaaggctcacacggggtttgtggtctcctttgacggctccgcgaagaccgagaagtatggtggatatggcagttgttcgtggatcgtgtggcgcctaccagaatggacaatagtgattgcggcgagcgcttacctcgagaagacgactgttaatctcgccgagttcactggcatgaccaacggagtgcttgcagctttggaccatggcgccgaagacttggtcatcgtcggggactcgaggctcgcgatccagcaatccctaggggtgatcgcatgccggaaggagtcgctgatgactcagctgagtcgccacaaggaaatcacggcacgactgcggtcagtctagtacctgcacgtggttcgagaattcaatgcggccgcagactcattggcgtcggaaacacttgaatccaagacgtcgaaggtggttctgagtgaaactcggatggcagagctctgcgaacggaaccgcatccaggaagtgatctatgagtcgacgccagatgaagcaacagtgcaaaaccatgttcctgggggctctattcaaattgcggacggatacgaggtgaccaaacccaggacattcgctgatttcgtgcgcaaagaacctttcaggatcatggcgatgactcgttcacaggctagatcgaagacgaaacgagtccgatttgcggacgacagtacgaacgagacgccacccaagccgatgactcaaaccgacaaagagcatactgatcaacgaccaccgaaagcagctcaagcaccgcccgcagcgccaaacgcagaagacattgaccccgtcgaagtccaagcggagaagcgacggcgcatagtagctgctcaggacgaggaactacggtgggcaaacctgaaaacagtcctccgaggcgaggtcgagaagctcgggtacagggctgcacgagatgcctggaaaattgcggacaagttcgttctgtccgacgacggactactcgacaatgtgaattcgagtcgtcgagacacgtctggagagcaagaggagatcaagctgcgtctcgtggtacccaccccgatgattcaagaagtgttgcagaactgccatgactcgctagaaggcgggcaccaaggggttgtgcggacctaccagcgagtcaagcgggattactattggttcggcctctacacagacgtcgagaagcatgtgaagtcgtgcccggactgcagtaccagcaaaagccgaccacagttgcgagggtattctcccggcaacgtgttggcagagcgaccactccaaattatgtccatggacttcgtaataccgctcccgatgactcggagaggcaacactgccctcctcctgttccaatgtgctttcacgggatttgtgatcgccaaggcaatgtcggacacgacagcgctcaaggtagcccaagctttcgaagagtgtatataccgacgattcggagcaccttcgttggttagacacgaccgggatcctcgctttatgagcgaggtgttccaggactttgccgaaatgatgcagtcaaggtcgcgggctacgctgagttatcggccccaagccaacaggcagcaagagaggtcggtgaagacggtgattcaacccgtgagagtgtacgccgaagacccgcttcagcaggactaggacgagatcgtggaacggttggtcttcgcgatcaacaactcacaagacatgacacggaaggaaactccattcttcctcgtccatggatgggacgctcagtcgacgttgaaagcgatgtcgtcatcgctccgtaggggcagtagcagacaatccgacgcgctggcgtggcgccgggacgtcaaccgacaacaccagattgcgctcgagatggccaaggaataccaagcgactgaaaaagcccgccgagcacgcgaacataacgaagcactgagccggaaggagagatcaaccatcccgatgactggcaggaacaagtcgtcgacagcaacgccaactaatcaggacgcggactcagacccctcaagcaacgcgccgatgtctctattcgagccgggtagtcgcgtatggctgtacatgaaacgtgtcaagccggggctgaccaagaagctggcccaccgctggcacggcccgttccggatcaagaagaaggtcaaagagtacgcctacaagctcgagttgccggaccggagcggctatcggttttacccggtagtccatgtctcgcggttgaagctggtgagtgaattcaaagaccgcccgaagactcgactggcgcctgacatcaccgaagactcacggctggacttcgacgagggattactccccgaagacagctgggcacctgatagtctggccggtgagagcgaagtgttggagattctggatgatcggatgcccatgtcaacaagaacgggacgctcagtgcgtgaattcaagatcaagtgggcagatcaggacgagcccacgtgggaaccagtcacccacctctcctgtgggggtcttctctacgactacctgaggcgcaagcgaagcgagcaacgccttcagatggtacaggtcgcggacgaagattagagctcgctcgcgacgactcaaagatgatgaactacgcctggggcaacgcagcccaggagggtagacgaaaatgactactgcggaagatggtggcctgtacctggggcaatgcagcccagaaacgcagacgaagacgattactgcagaagacttgcatgatttttatttttttgaaaactggacgtgacgatctggaagaagaatcaagaaaacctaaataccccaagctgaacgcacctacgactacaaccgtgaaaactcaaacagcttgggtggaagaaacacctgcacccgaagactcaccgttcctagtcgtcactatcctcgcgagcgtcaccctgcaactcagcagaagctgcagcctgcgccagcacctggaggtggtccgagttgtcgcgagccacgtgaggagtagctgcagacgccggaggctcgcttggctcaggacccgaagactcgtcggaagcttgggcaggttcacggaaaccagcatcccaatcagccgcgatctcgtttggcgtgaggtcgggacaaacgacgatctggcgcccgacttcctcgcgcgtggtgtttgcagggacgaacagcggaaaccttggattgcaggggaagaacgtcgtgttgtacggatgctgggcaggaacatccacccagccattacgccacggctcagccgcgtccaacgccgaaatctcgctgacccagtcggtcgtcttgggcagccacgtgaggttgtcgaaagggcaacccagcatagaaggctcaaacaaagacttggtgtggagagcagcgaacttcggttccttgctgacaaaccacctccagaactggtagatgatcttggctcggaaccgatcccagcgcttgttccgctcggcagcatacgccaaccactcagccttggcctcgtccagctcagctcgaactttggccttcgcctcaggggaccaattattcccttccagctccttggtagcgatccggaagcaattctccacggcgggagccggaatccagtggtaacgctcccaatccgagaacccaagatcaatatcgtcaggatccccgtaccctcgaaagttgctccaatacccgttaactcgagtcgtcgggggcgctcgctgggagaccttgacagaaggatcaaatccgtgggtgtcgaacaaatatgcgtgctccgggagacgccggcgaagctgctgccaagggtggtccgggttcttgaagtctttgaacgccttgataccagcagccgtggcagcaatccgagcatccccgggaataggagtcggcaactcgcaattcaaaatctggatccagcacttagaagcgccaggaaaccggaattcaggagccaagtatggagtagcccagttcaacacgtgtttggagtaacgagcagtgggcagcacatctcgggctgcaggcgaggcagacaaagagcgcgcagaacttgaacttggtcctggggccgataactgcgtagtgacgacttggcgcgatgataacttatggcgagacttagccggattcttacctcgggcacgagtcgtcggaaccttctgagatgccgcatttgcaggccggtgagccgatgagacagcgaccgaggtgtccgccgactcagcagaagctgcaggatcaagcggaagagaagccgatgactcagcgctggcagtaggcagagctggcgcaggtgacgagagattagtggaagccgatgacgacagaccgtcagcaaccggaggtgacgaagctggaactacagcaaccacctcaacgcgctctccctcccactcgtcgagttcctcttcatcagcagaagcagcaccgccatcaaccactgagtcgtcaaccagaccctccgtcaatccagcatccgagtcatctccgaaccactgaggcacctccggagactgctcgactgaagctaactgctcgtccgtccctccgcgatcagcccgatgactcaagccaccaacttgtggatcatcaccggaaccagagactgggacctcagcttggacaggagtttccgcagaagcaacagggggcgcagaaccaggaacagagggcgcagtagccttcgcgactggagcaggactcgtgggcggagagacactggaaccaatgaagcgcgcgtagaccggagagccgcgaggcaccgacgcagaacgacttcgtgcccagcgagactccttccgcttcttgggcaacttcttgggcttctccgacgacttcctcacgggagacgatgacgccgatgacccagccgatgactcggcagaagtcttgcgagccttcgaccctgagcgactcggccgagctggggaagcagcagcactgacgtagcccgagtcttcgcgagacctcttgcgagacgagagccgtggagaagacgatgaccgacgcgacgcgcgagatttcttgactgcagtggcagacgtccccggagtggtcttgtttacaccagcgggagcgtccttgcgcaagggatccccgatggagtcattcagtgagaaggcagtccgagccaagtcttcggcgatatctctgtccggcttggagcggtctgctgtacggtactgcttctgcaaaatcgcgagagactcggaagtaagatccagcaagctccaattgagttcaccagtcgagcgagatacctggaagcaagatgagtcatcgggacaaagtcagcaaacataaaccaaatgacgaccaaatggtgactacgaaccttctacggcgaggaccaggacgtcggggtccatatcttccagctgcacgtgagcgcgaagcgtcttgttggcacgggtcagccgcttcacttgctcttcgaggtcctcattgcggcggcgaaggcgagctggtgcggtgtcgtcggcggcgtccgagcgagtcagcagatcgtgcaagcacctgctttgagcagtcgaagaagcaacggccgccttgtagacctcctgctcacgtttcaactgagctagagcccgagcttgcgagtcttcggccaccctgacacgattctcctgccgctcgttacactctctgaggccatccacggcggtgttcgacgactcgagctcgacgatgtaatgagcctccagcagacgaagatgcgcgacatccttcttcagctgtgcgatctcgtcgttcgcgttcttcaagaataccttctggttctccaaagagtacgtctgcgaccgcaaccgattctctgcagcagcctgcgctgactcagcagagtgcagccgggcgcgcatagttgccatgtccagcgtcgagccttcgccaacatccatgttcgactccgcagcagtaaccacttcatcgaggttccgggccgacgccaggcaagaacccacgcggcgatcaccacggatgctcggtcccagctgcaggttcaccgagagacggccgagagactccagcttcgagctcagcaccgccaagatgcgctccgacgactcatcacatgcaccacggaccagctgctcaagggcgtcgcgacgcataacttgaccacgaccgcgcgagttgtcgggagcaggctgagaagaaccaggagacccagggcgagatgttgccggggttcccgaagactcgtggccacgcatagcctcgataagtggctgcggaggcacgccaccagccgactgcagatataagcagacgcatcaacgagaacaacgtcagcacgagtgaaaagaagggagacgcatgcagagacagggtacgcacctgtgcggcatcgcctggacgcggagtaccggcagccgtcgacccagcgcgagcagaagacgacgaccgagcaggcgaagacgcagcagaagcctggccggagaggccgccaccagaactcgacgcagcgggagcctgccgccagcagaataagcgcacacgcgtgagggtgagcagtcgacggcacgagcaggagaccgaacgcagcacgtaccatgtcagcgggatcgacgccgagcgcccggaacgcgcgggccagcgcagccttcgcggcgcgagacgacccagccgtggtagcgcgaagcaccgggagcaccctgacgctcaccaagtgctgtggctcgcgacacggtgtgggcagctgtggtgtcgagaaagttgagtgaagctcacggcaagccccgcggcattcggcgtcgactcaactggcggatcgaggcacatcgccattcgttcgatggtgtttgacggccgtggattggccagtctggaccaatgacgatgactcgtcgacactcaagctcaagccgtggtgtgtccacacaacaccggaacttcaaggacgacccgaacctacggcgaactttggcctgggttccgcacctaaggcgactcttcgagtcatcgggaggccgtccgagccttcaagagagttctgaagagtcgggtggttacctggaagatccacagcggacacgtctagactagatatttgcattgaaccataggaaagagaagatagaacagataagccctttgggcaacaacgacagaacagcttttcctcccaaccactcaaggaagacgtccgggctatcggtgagttcccgtagcaattggataaacctgttggtaggattatgactgtcggtggacgcgcctgctagtatcgtagcgtgcgtttacccgtggtcaggccaagagtagtgaagaagtggccatgtatacgaagggcgagtcatcgccgtgtagtggaggagcgagagcgcactccatttatccttcccgtcggagtatagttccggcaccctcgtatcaagccgtgactggctgggaccattccttcctgagggcctgcgaggtttatattgtgtgtgagagcgtgtcagcctttgctcgtggctggtgacgctgggtttccgtcagttgactaagcggaaacacgatacacagaggaaacatcaacccggtgcaagggaaagttcctgggccttcaggttctaaccctaacaagcccattgagtcatcgggacttggtgggtgttgttggtggggaaagtgtgctattatataatttagtgcgtgttcctacacgacactggcgcgcggcactctgctgcgcgatgtccaatcttccggcagcggaagcaagtcagaggacgagcgttccgacctcctcccccaccataagccgagcgccgtcgatcacccgacgcctcaattgcgtcgatctccatgggctcgggtgcggatacccgagagacgcccggcatagcgcgcgcgtacgatgccgccaccacgtagtcctcgcggagcgcgagggcgaatgcctcctcgagcgaggagggttcggctctcgtgagacagtaccgcgtcatgccttcgcgcatcccgaacacaaagacatgcacctgagatgccatgtcaatggggtgggtgacaatgcacgacgcatggtgtcgtgtcttctggacgtagtcgcgcatggacatcttgccttgtttgagggcgaagaactgagcacgaacgcgcgactcgtcttggggcggctcgaacgcgagccggaggtcactctggagcgcatccaaggtggggaacgtgtgctggtcgacgacgagcttgccgagggcccactcgttggccttcccggacagccgggagagtaggaagttgaccttggctgccggtgcttcaatcatgcgcgaggcgatagcgatgtcgatctcgcggaaccagcggttcagcggaagccggtcgtcacccacaccggagtatgtcgatgtctccagtttgacgacgtcgttcctcgaggagcgcgagggagttgtgacccgccgattcgcatctgcgagctcgcgttccatgaattcttgggcagcttggcgctgttgttccggcatcgctgagctcagcagcgaggtgacaacagcctctccggacaccgccgcgagtgtaaaaaaatgattgataaaaaaatacaaaaatgctattaaaatacttattaaattttaaatttaaaaaagtctaagaaaccacgtacacctaaataaataattacaatcgagctaattattcttatgggcctaagtagatttgaaccgcatttttttcaaacttaaatcctaattttaaaaatttgttaaaaaaatgcatttggttatttaggaatgatttattgtgaatttattcttttatcatttggaggtaaaattaaattaaattggtatttaattggaccggattttaaaatacatttagttagattaataatttaacaaacacttatattcaatatgtttaatttaatttattataaaatttgactgggggaaggcaccatgctccagggttgcccctgaaggtccggacgtcaggacttggctcatcttggtcttggtcgttggaaggactacgaagtgctacgaggtgtaacaggccaggtgtgtgtccgttactagcttacacgtagcggtgaggaagcttagttaagactcggatttaatgagaccaagcagtcagtcttggataaaatcaactctgttttatgttaggaccagggcggctaccccttggtctcgtgtgagccactcaaatgcagttcaacgtctgattggctgaaatggggtctggctcccccaattcagccaatcacgatgaccgtcagtacacgctagccgtgtactgacttaactactttatgtactgtcaatctacctacttatgtaactggggcccattacagaagtcctccgagcactctgtcgatccgcggatctcgttttgttcagcagcgtcttcgtcgatccgatatccgacgacgcctcttcccctggtttttccttcactttcacatcttctacggactcacggtaaaatccggagtccccaagagatccgggcacgcgcaccattgtggtgtagcgggatcggccaaaatcgggttaaggcctgatcgagcttcccaccagcgcccagacaccgactaacggagggggtcccccaacgatccgtgatcggctgaacttgttctcaccttgtgtacccgtcggcgggctggatctgctctctcggggctccgaagatgcagcacttggtgaagatcgaatgtcttggcgtgacgcggggataggttgtggagcagcgcggaatcttcgctctgcgtccgagtatacgctccgatcgagggttgttcgctccgatcggtcggcctggagttgatccaaggcctgtagttgcctttccgggtgtgttccttcctttcctgagttgcttgccgcttcctatagcgggatcgaagttgatctagaggagaaacgatcgccggccaagctctaatatccggtcgatcgaggacttgcacacagaagatagctcactagagtagatcaaactggcctatgtattaatccagtcttaaccgtaccactagttcactacccaaagtgtcgacgctgccgaggccaatgcagttcctgggacttgacgacttgaggggacttgtgctcttcggtgcaaattctgctctgatttatgtttagctggtatctctctaccgctaccatctcatctaccatcctacaactcaacaaccactggattcttgacctgacttcgtcctccatgtgcatcccatcgtggtcgatccccgatccacgatcaacccacgtggatcgggaaccgatccacgatcgactcctgatctgcgatcgactcccgatccacgatcgatctcgatcggcgatcaactcccaatcgatgactgatgccggttgctgtgcgccgccgatccatcatcttccgtcctcggccgtcctagatctgcgagatctgtcgtcgatcggggcttgggtcaaccacgaatcacgccacggttcgagcacgatcatccacaatccggcttgccacacgtcctgccttacgcgccggcgtcatcgggccacttgagatctcccgaagaactccctctgatccacatatccttgctgcctgtctctcgatcgctgatctcccatacttccagtcgatcggccctgccgcctttctcagagaacaattcttattcagtacttctccacaatgaagcctgcgccactgcctagagggttccgaacctcggccgaccctggagaagaacaagcacgacggagtggagctgacacggtgcccaacgacgttagatctccgacgaaatctgagccagcacgccaaggttcgactccgtagaggatgccccttcgtccgaccccttggtccccgacgaggggctaggagagcgagcttcatgagcagcagcaaactcggtgacccacggggcaacgaccatcgacgtccgcaacgacggctctatcacgaccgacgacgccacagcctccctagtcatgtctcgaggaacaaacaagggaacatcgttgcacggagcgaacgcagtgttgtacgggtggcttgctggatcttgaaaccagcagttacgccacggctcgccggcgtcaagttcggcaatctcagagatccagtcgtcggtcgtaggggcccactccatcacctcgaacgagtattgcgagtaagagggctccaaaagaacctcggtcgggtgctggtggggctgcccgtcgtagtggatgacagcttgttgaccatccgatctcgcaaccggtccgcacggtagctgcgctgcttgtagtacttggcccacttcttgcgaagcttcacaaccaccgggttgcggtgaccgagtgctgcagcgaggttgtcgatgaatgctttgatggccttcgcccaaatccaatgacgacgctcccacagggccagcccgagggtcgcccttctcgttagggtgaaaggaattgccctggaactgcctgctcaggcgaacgacgagttgatgcccggtagcccgtcgagaaattgctcgatttggcgggtacccagtcacgtcgatcaggcatggatccgggaagagccggcgcagaacttggaaagggtgagcgaggttctcctacttgccgaaggccttgatcccgtccgccgaacacggagcaactaagtcgtcgtcaaaaatgagaggcacgctagcgttctggatcaaactccaacactcttgaccgccgggtgacacgaatcccggttcgagaaacagtgacgccaggttgttgagcttgcgcgaccctgccgccgcgtccgaagcgtcgaccaccgcaggggcgatagaagcaggaccagccctcggtgtggcagtcactgtagctgtcaccaacgcgtgagcatgaaccgaagtcgaccgagtgtaaggtcgatggggcagcgcagctggagcggcttgggcaaccacaggaacctcggtcgccgtagcctgaggtgccggaggtgctgcaggacctgtccgttgggcagccgaggcttcgctttcgtcgtcggagccaaacatctctcgcatgagtgctgcacgatcctccgaggtctccgagccatccgacgaccctccttctggcgagccctcgggaggcgatgagtcaccggggccagcggcagtcctcgttggaggagccgacggcgagcttctcgaggcagacggaccctcgttgtcaccatcaggagactcggcaggtgcgtcgcccgtcggaccaacgctgaccaaggcttgggacacgatcgacgcagcttcgggaaccgggacggcaggcggagactcggtggtagtagcaggagcctcggaagcggggccttcagcctcctctgtaccggccggcgcttccggaatctcgccgggctcaagatcgtcttgcgggacgtcgtctggacttccagcaccgccgaactcgaagtcgggatacccctcgtcccgcggaggtggagaccgagctggctgaggaactagagtagcgcccgtcaacctagggtatagcggcacgtccgagtgctcgtacggaagaggctgagcatccaaccggctagttcggaacgtcgttgagggtcgtggcgtcgacggaggcggtgcagggacctcacccgatgctgaccgaggctggatgacccagcggccgctgcagctctgactctcaggtcgaccgacggtctaccgaaacgcttgggcggagaaggctgagataccgtgccctcggcagaggccgactcggcttgcgaatcgggcttgcgcttgaacgccccggtggactcagacaaaccagcagacaccacctgcgaagccgcgggagcagctgaaccctcggtaggctcagccatcgatacgccagccgtcttggactcttcctcttcctcggacgaggatttgttacggcgcggactcgcgacagtgaccgtcagtggagacagcccgaggagattccagtcgatctcagcggcggagatgccagccgaggccaagaccaaggaatccacgtagagcccataggctgccgagtgccgtcgaaggatagagttggcccgtcgcaagctgttgttctcgtccgtcaacgccctgatacgggcagggataacatcagctcggtcacggtcggccaactgcttccgaagcttttccaactgggtgttgtagacaacgaggcttgctttgatacgctcatggatctgcgtgttccggcgaacagcagctgctgcgtctgcttccgcggtctgcgtccgaccttccaacgaccgagtaatgttgccgtgctgggagatggccgcgttcatctccaacaactgctgattagcgtgtgtgagctcggtacgcatgtcttggatgttctggagcgcttggttgcagtccgagttggccgtcacaaggaaatagtcagcccgttggcggagatgcatctcctcgtcgagcttgttttaggtgtcgacgagctcctctcgcaaccgatcgttgtcgcgacggagatccaccagcccatccgactccgcgagagggaacgtacaggggccacagccgcggccagcacctcaccgacgttagtggcagcttgcaggttgcggtcgagaacagggttgactcgagctagaggcaaacgggcaacacccacgacgagacgagcgagttccagcacctgctgctcgcccaagacaaccgctgtcggaggaacctcggccgggccagcaccagctccggcgcgaccccctacagctgcctcgccccccccccccccccccccccaccgacgccccgcgagttgccaacgtgaccgaaggcgcgggagttggcgacggtggagcgctggcgcttggcggtggtgtcggcggcgagtcgggagcctcttcaatgggagctgccggcgggggagtctcggtcgccccagcagcagactcaggactacttggaggagccggtggagagtggaccgaggtcccggaggcgacaggaagaagcgtagggtcacctgcagacgcggccggggctggaggcacagcaccagcggcgataggggcggtggcacccgccgaacgagcctggcgcgccggacgacgacccgaagtgtcggtggcgacatcaacagctccgtgagatgatcaagaaagagatggagtcaacaacgaggatccgaatgacagtgaggagcagcaggagcgacgaacgtaccggtccggagcactggagagcccgaagagcagcggcagccgcgtcggcgaacgcacgcgatggatgagccatggagtcgaagaacataggacgcctagacgctcaccagcttgggaggctcgcatcgaggcgggggtagttgtggtattggaagtggcagtttctaacgctgttgacccgccagcccgacaatcaacttcaatcaaggggcaatcaaggcgaggtcaagcgagagacggagatggctgcttctgattggatgatgacattatcctcggtagagtgacagtcagtggccgaagcctcgtcggggctccacggtaccaacttgagggtacagatgcatttagttgcgtacttcgaccgcacttattagtgtggccgcggtcgtcatttgatatgtccggaatcgccttattgcggtcgttcaccctagatatttgtatagggatatgggactcatcataggatgatcagaacgaggccccagggcctcagaaaactcagtaataaaaagactgtcttcccccaaagccaacaagggtcaagtccggcttcggtaagtgtagctagcttattggagtgcctggatacgctcggctgcgtgtggatgcctgtctgggagcttatcgtgcattgaccgagagtttccttggcagagccaagagttggcgtggccggagaggcagtaacggtattagagtatcgttcaatatatatttgtgggattagagtgtccctgagtgtattagtctacctaccgaggttttaccttggtccccctgtataaggcctaacacgccggtacccttcctttcggagggactgcagtggagttgcgcgaaagcgctacatataatcctagccttagctcgtggctagtggtacaggtttttgggttgaccgaagataatctaaggtgcacagaagcgcttgcaaccgacccggtgtaagggatcgttcctggtcttcaagttttgatccaataagcgcttacctttgcgggttagcgtgttgttggtgtctctaatacgttttggtagaagagaattttagtggaattaccacatcacaatgatgtcttcacagcaatcaatccttcagatcgaccagttgcaatggaagactggtatattctcttatatggcggatatgttgtggatggcaagagtaggagaggagcgtgggttttgttgggcggttacccacccagaatcgaagcagttggctttgtacacgtgattgaagcacaagatggagatggcagcattactccatacctagagcgggcgatgagccagttgatacactgtgcattactatcgacagttcgactaacactccaaggcacctttctgagtactcgcggcagtacagcgccgccaatttctagtgttggaatgctggtaagaaaaccgcttacgaaaggaccacaaaaagccgtaaaagccttcgtgaaatcacgccaactggcaagacacacagacgcagtgctcctgagagcagatagtccgcagcactttaccaccaggttacagaacgaaatgaagaccagtagtagcgaaaaggggttgcatgatcattattcgattcggaacaccctacagcaattccaggactctatagtttctcgttaaacgtaaatagaggacctcttacccccccccccgggaaagaactgtggtattaataataaacttccaactaatacacctcaacttgtaggctgtggagcgcatgctgacattgacactgccatagaccgtggtgtttaactgctatttgttttcgaattgaggtaaaaaaaaaattgctgtcactaagctaatacgccaaggtggtcgggaggtggatgcaggagctaagaatgaagaccatggatcagcgcaagtaatttgattgttcgaggaacattgtctttctacatggaaagtatgcgtgaaggcagtgaaggactttacttttttactttatgttatatatctagatatgactttatgtgtgacggggcacacagcacttcttaacagaggaagcaggagtatacaaactccaagtgaacagccgttcacgtgtccctggtctgaaggggacgacttgacttgaaaagcggtagatctaagactgaatgtatttataggttggtacagatttggcctgcatacaaatcctaagctccccgtagtttgtgtcatacaaaatgtatctgttggctctgaggccacttgggtcactatccaggggagtgaccgatgtagccatgccggaatagtgacagggtcactattccatgtaaccccgttacatcctcccccacttagattcgatcttatcgaccaatcagagcaaggttacgccggtgactcacatttcactcgcaaagtcgaaatccatcgacaacggcgcgagctctggcgcctcggctcccgggcctcacagagcaactggcgcatcgccgagcaagctgcagggtctccacgtcgaccggaagcatgcctccaaagcgcagtgcgcgcagtgcgaaagcacctccgaaaccgcgggccgtagggccgaagaccagggcggccaaggccaaggacgagtcgtccgcgctgatggaggccatgaaggcggccgaggaggttgtgcgctctcgtagcagcacgccggagagtggccgtcaggccggggctcggagcaagtctcctgacgccgcgcaaggcaaggaggagagtcctcggggccataaagcccggctcgcgactgggaagccgacgtctttgactgcacgatggtccagtactccggtgagagttcacccgacgacgagaacgtctcggagggcagcacgcgcgctaccgaaggcacggagctggcggcaggcgacatgaccaacgcatcggccgacgcaaaggcctcgtcagagaaggaggcggaggacgccgagtccggctcaggcgacagcatagggtcgtggccgagaagtcgccgagcgacgcgggctccaagcccaaggaggtgctggcatccaagcatctgacgctggcacaaggtcgtgagcgtgcccaagcgtcgaaaccggctgccgctgcgaaggccgccgaggccaaggcgaagaagcgctcagcttccaggtcgcctcgcggctccagctccaagctgttcatcgactcggagtctgaggacgaggagggtgccgtctacgagcccaaggagctctccaacaacctcgacgagcagcagcagcaataccacgctgctagctcgggtgcgtatgccaggcagccgactgccacgactgccatcgagtcttcttcaggcggggatgcacgtacccgcagggctacttcccgcccgagcctggcactggtgcgccagcgctgttgtagaagctctcggctcctcgtggccttatcggcgggtacacttcgaggtgttcctatgagcgtgctcttgttgagaaagagccactctttcttggcgacgttgaagtcgcccggtgtgtgctactagcaccacacaagctcacactgaaggagttcaccacgcttcgcaagaagccggaggacaagggtggactccatcctgtgtggggtttcctttgggtcaagccgaatgacaacatgacctggagcgaggtggaatacctcttctggtgctacgtccagcgcaaagggtattccgaccaagagttcaaagagctccgtgaggatcgcactctgtccgcaatcctggacgtgcgcgagctccgcatcgagttcgctcaactcgtgagcaagcgcaagctccactcgaagatggacgagctgaagcaagaggcgagagccaaagctcgtgaagagcgtgggcgtggtgcgactacgtctgctaccgtgccccgggtaccggccaagaagccaaggactacttacgaagctgccgctgcttctcgtcccatatcgcaacagccttcgggcagtctgcctggagctgctcaacgggctcccacgagttatccgactcagggtaacccctccacttcacgagcagctggcgcttgccatggagccgccgctcccggactactcgttccacgtggtagtggatcggcccattacgatcaaggagggccggcggtggcctcgcacggccatggctacgagcctgaggcgacgcagccgtatgctggggccccgagtcaggtggtggccctgcagcaagaggagattcgtcttctccgggaccgtgtgtacgtcctcgagatcgcgcttggcgtcggcgtcggtggcgaggctgccgctcgtgctggtcagcctggtgccgtggagcggctccgtgaggatgttgcctcgctctatcaagaaactcgcagtctccatggccgtgtggatcgtcgagccgacctgtcgtcttacgactcgctgcgaaaccagctcgctggccttcgggccgagcttcttggccacgcgccgtatccggagcagcagcagctccactcgtatcaggcccagtttgtccagggctcgtacggggcccctgcgtatgctgctccgatgtacgccgcgccgtcttacgaccagcgcgcgtatcaggcgccttaccgcgacccgacgccgcgcttcgaggagctgcgctcttctccaccgggccacccacctcttcctgcggggcagccagagccagagggtcatggtacctcttaagacgacccacgtaaaacgtcgggtgagtcgtcatcggcttgggcaagtctatggtgtacgccgcgccatgccggctgaggaccgtgaagggtccaatgaagcggtgcttcagcttgttgctctcgaccgagctaacagtgtttagcggtaggtttctagtatctaggagaactaaatccccaaccttaaacacgttcatgtttcctcttccatttcggtcagagtactccttctgtttatcttgggcttgcgccatggtgtctcgcaccctgctgattatggtcagcctgtcttcggcaaacgaggacagttgcttccgcaaggtggctggactcacgtccgagacttgggaggaaaaggttttccgagcctctcccccacttaggaacgaagccccggtactgcctcgtaatgtgagcggcacctgagggtggcgcaacccgttcaggtaaaagggcgtaaagcccgtcgatgcatgtaccgcattgttgagtgcgaactcaaccatgggcaagcgatcagcccaagagctgggcatctccgcgcagatactgcggagcgtgtcttcgagcacgcgattgacgcgctccgtctggccatccgtctgcgggtggtccgccgtcgacatcgacagtcgtgtgccgagaaggcgaaaccgcgtctgccagaacgtagcggtgaaccgcgggtctcgatcagagacaatggtctcgggcagaccgtggtgtcggaagacacagtccgtgaacaggcgagcgacctcgtcgccagtgacggcgtcacgaactggagcaaagtggaccatcttgctcagacggcacacgaaggcaacaacaccagtgttgccacggtcatcggccggaagtccgaagacaaagtcgagactcatcgacttccagcagtccgctgggaccggcaggctctgcaatggtgccgaggcgtgaccggcaggcttcacgcgctggcacgtctcgcacgtacggacgtaggtggcaacccacttgtacatgtgacgccaccaaaacatctgcgagacagacgcgtacgtcttctcacggccgagatggccactggatggagcgtcgtgcgcctccatcaggatgtcgtacttgagatcctcgtcgttgggcacgacaatacggggaggatcctcgggctcgaccctatagcggagcaaaccgtcagcccactcatagcggtgctgccttgcacgttgtcggggcgtgagccactcggccttggcttccgagccagcggccaagaaccgcacaagaggtccgagactggcatcgtctcggtaccccagcctgatgcgatcatacagatccgtcgtgacccgactaatatgagcaagctcgtagtcgggtcggcgcgacagcgcgtcggcaagcacgttcaacttgcccggcttgtactcgacacggaagttgtattccgcgaagaatgacagccaacgcgccatccgctgtgagagatgcggcgtgttgacggcagtccgcaaggacgcgtggtctgtataaacgacaaagggcgtcgagcccaggaggtgcactcggaacttgacaagagcgtacttcatggcaagtagctccttgtcgtggactggatagttccgttcggctgccttgagctgcctggactggaacgagatgacccgttcgcggccttcatcgtcggcctgcaatagcgcacagccaattgcgtagtcagacgcatcacagactacgctgaaaggcttcgtctcgtccggcaatgccaggactggcgcgcgctgtaagctcgctttgatgtcgttaaaagcatcttgatggcgacgctcccagcgccagtcgacatccttcttcaggagatccgacaagggccgtgccagctcggcgtagcctgcactatacttgtgcaggtagttggcgaggcccaaccactgtcgtaggtccttctgcgaccgaggtggcggccaagccgcgatggttttcaccttctccgggtccgcccggaccccggcgctgctgacgaagcagcccaggaccttgatctcctcagctgcgaacacacacttgtcgatgttggcgtacagcttgttcgcccgcatgacttcgaacacacgtcgaaggtgctggagatgcacctccatggccgtctggcctgcctcggcacggctgtggacgaagatgtcgtcaaagtacgtctgtgtgaacgcacgcaaaggtcggaacagttgtgtgaccaagcgattgaacgttgccggggcgttagaaagcccctgaggcatgaccagccactcccagagcataccgctcggcgtgctcacagccgtgagtgggatgtcgctgtcgcgcatcaggatctggtagtatccgtccaccaggtccagcgcgctatacagcgtgcagccggtcatgttgttgagcaacacgtccttgcgcgggatcggtgtctgcgcaggcactgtcgcgctgttcagcttgttataagcatgaaccagacgccactttccgttcggtttgcgaacacagaaggtaggcgtcgagtgcggggacttcgactcccgcaccatgcctgccttcgccttggcggcaaagaaagcatcaatgatttcacactgctcccggggaagaggccattgcctcgtgacacagtacttcgtgcccggcacgagatcgatctcgtgcctgattcccctgtccggagggagattggacggtggatccttggacaccacgtcctcaaactccttcaccaaggggtacaccgggtcccgggggttcttaagaatctcagagcccatgcgcgacgcgcgctgtctctggaactcctccaggactgcctggtccatgaccgaggacgagttcaactcggccgacgtggactccggtcggaggagaaccaactctgcgatctccccggcctttagctcggccaagaagccctccatggcgagctcctcaaggttcagcaactctgaaacctcgggcagagctgtaagctcgacagctcctgtcttgatccgacgaccggtcacgccgttgaagatgtgataacactcttcggcggctggagccttggctggaggctcggagtcgctggcgactggcgtcgtcggccacacgactaggcccggcttacgacgtgaccctcgggtgtcttcgtctcgtggcgccgccttgacggcaccaccgatcttctcgatctcgtgcggaacgacgttacccgccttgtccttgagcggaacttggttacccgccttgttcttgagcggaacttggttacccgccttgctgggtggaactatgttacccacctcgccgtgtggaacttggttacccacaccaggagcgcttccagcgactcccgcatcagttatggtctgagtgacctcctgtggaactatgttacccatcggaagcgcctgcagtgccttcctcatcagttacggtctgagtgacctcgcgtggtacttggttacccacgccaacgccagcggcgccttctccagcagcccttgctgcctgcggtacttcgttacccgcgtgtggatctccgttacccacctggtaggtgctgtccggcacctccactctcaggccttgtccggcccggtcggagtcgtcgtcagtctcgacggaccccaagaactcattagacgctgctgcgccctggcggccctcgcgggcgccccagctgctgccagaggtgggaacatgactcacgaaagctctgtcagagcgtgggggacggcgggccccgatggccttgccgcgccattcgatccaaggctcgtgtttctccagccacggcatgccaaggatcaagtcgtacttgtccatgtctaggaccaagaacggctccgtgctgtcgaagtcctcgaacttgacagtgaggtccatgtggacccgaggtacttctaccaccgtaccgtcggccagtcttaccgagaccagcccgttgcctttgctgcctcgtagcgcatcggcgtacttgtcgcgattgcgtgcgacagtctggcggcgcgcaaagttcttggacgccccagagtcgatcaagattctcaagggatgatcgtatcccggtacactcgcgtgcaccacaagcagcccaccgctgtccttctccgcttcgagagtacagagactctcaggggctgagtccccatggcgtgcgccacccgcacgcccctcatgaagacttagtgtctccccagtagggcgccccgcgcccctactggtgtccggcgttcccctggttcctggggcgcggcttctgccagcgacccctagagccaaagggcttcgaggagaacttcttcttcagtcctcccgcgggacaagcacgtttcatgtgccctagcttgccacagccgtagcagcgaatgtcgctctgctcggccatgcccagatccatgggaaccggcccgttgatcgctccattgccggagttaccattaggcgcaccgccagaggcagggttgctctgccataccgtggcgggggtacgagcctgcttgtggctgtactcctcctggagggcgatctgaatcgcctcctccatagtacacggaacagttgcgtgcgggcaggaccgacacgcagaccgtccttgaacacggtcaccttgatgttttcaggcaggaggttccccaccaaagaggcagtgagcactcgcatctcctggatgtactcatgcagctcgcgccttcctcgtttgcaggcgaggaagcgcgaacgctggcggtactcgtagttcgccggaagaaacgcggcccgcagctgctcgcacagctgggaccatgatgcgaagcatccaggcgtcgtcgcttcgcgcgtatacgcccaactcttagcgcgaccactaaggttggagagcgcacaggcgacacggagtcgctcgtccgagacgagagccgcgtccatcgcgagctcaacctctcgaacccagaagtgaaggttttctccttccttcccttcgaaggggtgaaccttcagccgcaggggcttcggttgcaccggcttcggcgcggccgcagtggcctgcagcccttgaacgtgggcgatgagccctcgctcgtaggtgtcgaacgcgttgatacgctcaacctgctcagccggcgtcgccgccgctaagctgcgcagggcatctgtccgaaagatgcctgccatcttacgaacggactcgtactgcgagtcgttcagatggggaaactccgtacgatccatcttggctcactcgatgagaccacagaggattcaggtagtccaatctacccgcgtaggcgtaggattgactacaagtgctacctagtgtgacggggcacacagcacttcttaacagaggaagcaggagtatacaaactccaagtgaacagccgtacacgtgtccctggtctgaaggggacgacttgacttgaaaagcggtagatctaagactgaatgtatttataggttggtacagatttggcctgcatacaaatcctaagttccccatagtttgtgtcatacaaaatgtatctgttggctctgaggccacttgggtcactatccaggggagtgaccgatgtagccatcccggaatagtgatagggtcactattccatgtaaccccgttacattttgttatcgcaggggaaattcgtgcgagtggccagaagggaatcctacgttccgcagcgtcgtacacgcggtgcccaagtccaaagctaccgcattgatcgacaccactgacggagagagtgagtactggctacttaagtgttggcgcggcaactgaggtcacaacaagcaaacgtgcaaacagatgcgcctaatatggtcggagctttgtcagtagacgtatgcgaatctatgcgcggtgtattaagcgcatagaccttaaaaggtcgctacgggataggggtagctggttgctacgccttctgcatctagaacccatgttcatacgactgttgtcattttccccagcccagtataccattccgcagtttggtgtaatcgcactttagttggtgtgcccacacttcagtttgcagatcccgaggttggcgagcggctaagcaccaggtcgccatgaagctcgtcaggttcgtgtcgcggcgccactgtccgggccagaagaagggccgggcacaatccctccgtgagttagactggtgcactcgcgtctggactcactcgcgtctatttcttgcttcctgtcgcgtaggtttttgatgaagttgtctaatgagacggtcaccatcgagctcaagaacggaacgattgtccacggaaccattactggtgcgactgcgctgtataggtgctttcgctctgcattggcgtcagtatggactgatttgaatgtcgttcctgtgtatttgctgcccacaggcgtggacatcagcatgaacacacacctgaaggcggtcaagatgactgtgaagggcaagaaccccgtgaatttggactcgctgagcatccgtggcaacaacatccgctactatatattgccggactcgctgaacctggacacgctgctgatcgacgacaccccgcgcgagaaggtgaaggctggcgcaccagcgggcagcgggcgcggccgtggccgaggccgcggtcggggacgcggtcgtccgtaatagaggcgcggaggatgagcctttccccgttcgttgggcgagctactcgaggagggaggatgaagagcgtcgggaagaagcgcagtaacgcaccgcggcaggtggcggcgacctgaactcgttggggctagaaggagaccgaccacgcgcattcgacgcagcagataaacagctttcttttctaagttaaagggacttcatttgagcgcggcgacgagagaggaagtgcgtgcatgactgaaagatcatgaggggctgtacgtagcaggtcagcgagcggagacagacaacctgctggacggttcgtcggcactcggctattagcagcagcgtcagcagcattgcagcatgcccatctctatgactctcgcgcaaatacgtatctaggcgcatgcgagttggctcatgcgtgtgtcatccccagggtgcatgtggacgatcgaacgccatgccggtgcctaccagccaggcaatgcaacttgctcgtacctaagtgaatgtaccagcttcactatccacaacagttgcagcagccgagatgccgcagcagaacaagcgcaaggccgaggaggacgccgccgccgacgcggacgcggacgccagcaacttcctggaggacgcgcagcgctccgtggacttcctcttctcgtcggtggtcgtgctgccgggagacgacgtcactgccacgctcaccaagaccacgcgtcgtgtcaaactcggtgcgtttggctgaatcggatggatgaggaggggctgctcgaagactcactcggcattgtacgcactggcacaatggatggataggtgctggactgaagcagctgccggacgagcggatcgtgtgcacgaacgccggcgtcctccgctaccgcccagccaaccgctactgggtcgagttcaaccacaagcgtgtacgtaagatgatagtgatgcaccaagtgtctcccgcaccgctaaactatgcttgtccttgtgtgcatgtgctgctgtcgcttgatgtacagtatgttgcgtcgatggacgacggcgtcatcggcgtcgtgaccgaccgcaacgctgagttctaccgcgtgaacatcggggctgcgtacgtgaatgaagtttgcatgcccgtggtggtcaagaccatagctgactgttttttgttggtgatttattcagtgctagtgctaccttgggcgccctggcgttcgacggcgcgacgaagcgcaaccgccccagtcttcgcctcggatctctcgtgtatgctcgcgtgagcaagaccaatccagacgtcgagcctgaaattacctgtgaaggtgcggctttgtaggcttggcagtctattgtatcgagttttgcttgctaaactcataatctgttgttgcagcgcccccaagcgtgaccaggaaagactggatgaccggcctcgccatttacggcgagctaaacgatggctacgtgttcaaaacgtccatcggtctagccaagtcgcttctacacgaagattgccaggtgctagcgtctctgggcaagaagctcgcgttcgaggtggctgtcggcgtgaatggcgtcgtgtgggtgaacgcgaagaccacgaagaacatcacgatcatctcgaatgccatcatgaactcggagacgatgtctcccagcgaggtcgacgctatggtgtcgcgcctcgtggaagacgcggacgacgcgtaatagagaaaagagcaatacatataggtacgcccagaagcaagcgatcaaacggtgcgtttttccttttgttctacctaccacctgatctcggattgttgcgacgacgccagaccgacctccatagtactgttacacttaccttgtttgggccaagaacgcgtgctcagcgagctcttctgccgttgcccgctctgtcaccattggaaccatagttagtcgtggccccaaaacttgtggatcattcagcgcaattaccttccgggtcgatacagaagcagcgccgtaagaaggactttgcatcggcagataaatgatctggtaatgggggcggggcggtcgccatagcgatcgtgtacatggctgctaggccgttatggcagtgtggccacgggtgtttggccgtagccatttcaataacggtggctccaatactccaaatgtcagccttatacccgtggccagtctgcttcaccacctcaggggccatccacggaatcgagcctcgaatggagcgcagagattcctctaaactcgtggttaacatctgcgggatctgcttcgagcagccaaaatctgcgagcttcgacacgccttgctcgttcaccaaaacgtttgcacctagcaaacgaaattggattagtatgaaatgaagggggtactcagctcctttgctctccaacgctgtttcgaacctttaatatcgcggtggatgatgcccatttggtgcaagtagataacaccctggacaatttgtcgaatgaatatccggatgaggtcctcactaaaggcgtcgaactgcttaagcatgctggttggaggggaactaagaaggtcagatgagaagcaggagcgaccgcttttttctattgacacgcacctggcaattgacccccctggaacatactccatgaaaatgtagaaatggtttgcagatcggtggctccccttgtagctagacacagcacaaggaattcccattagcgcagaccccactaaactcgtgcaatgcgtaggagtgaagtccaacagaccgaacaatatgcttgtggctgagattattcatgagcgcgatctcctcgccgagcttctgcatctgagtgacctggtcggcattgggactcgagtggatttcgatctccttcagcgcaaagagttctcccgtagaaatgttcaggcccttgtaaacctagtacgcaaagtgcatcgtcaagaaatacgccctcaaaaggtaacaaccatagacgccaatacctttccgaacgtgccctctccaatgagctcgcctcgcttccattgtgtgattggattgctaacttcgacttcgatagtcgagttcgcttctgcttctgcttctgcctcggcttgctggttgttggaatgtactgctgtcgctcgtcgaagagaagtatcgggcagcgacgagaaccccgggcgcccgatccgtggcgacgttgaccgtgtgagggacatggactttggaatatccaaggcggaaagtgctgctaggtgcgggtgcgtaacatggagctgagaaaccatttcactcgccgttggaatgttgacaacgtcactgccgctgctgcgcttcgactcgaggggctggatcttgctagacgccgacgttaaagatgaagatgacgatggctttgtgtcttcaacactggagccggcgaaaataatggcgtccggcatgcgcttgttcctggcagctttgccccataggccaaagttcgatacagccttctcttccacctgtgtgggcggtggtgcttcgttaagacggcgatggacttccaagttgttacgcgaaataccgtcatgcacgtcccagttaatttcttcgctctcgtcactgctatcctctctctgatgctgctggtggtcgtcgtcgtccctgcatctgggctgttgatactctggtttctcgcacagctcttcaagaccttccgggtcagtagctgatcgactcctttcgtggtctttcagcgcccggactgcgatcgagaagctgctgcttcgtggtaagagactgtcgctgctgccgggtccgttgttgttgctgttgttgttgttgtcgcaatcggcgctgtagagccgctgtctgctctcgggtctcctacctgaaggcgctcggggagtcaaggcatttggcgccgagagcagcgccccgtcagccaccgagagatgtttgagccgcagatttcgtccactcgagctgcgatgcatctccaccactggcgactgacgcagtgcgtccaccgcgcgatggctcagtggagcagctgcagcactgtccttggtcgaggcttcattgtccgaggccagcatggcaccccttcgactcgagttggattctgctgcgtcgctgctggagtcgtcgcttttgggcgtcggttgaagctcgactggtacctttgtgtcgtcttcatctgcggccgggctctccagtatcgcttcacgtctggattgactccgcatcacggataccagcagcgaacgctcgagtttacctgcgcgcagcaaacaggcgagtgccttgctcgacttggcagctcgcagtgatcggccgggcgggcgcgtcgcttcgagcacatttcggttaggcgaagccatgccgtcgtccgtcttgacacgcatccctcgatgtttgacggaccgaggagtggagtggccccactagttcccctcgctaggacggagtcgagatgaagtgagctagcacttccactcgattgatcacgagcgtgacatggctctctctacctggcggaatcggggccttcaacacggagattgaaggatacgaaaccctcagaccccaatgagtgtacacatgtggaaaactgtatgatatcgactatcaagaatctctcgacaactacttgagtacgtgtcgctgcggttcttcttttcttgctcgctgttccaggttgagctagattgagcggaagatcgatgatgatagctcatcgatcttatcttacgctgctaaaaaaaagtgttggggcgagcacaacaactccccccagcgctgcacaattgaactgacaccgaggccaggaggcctgcttagcacagcgaagatgatgtctgccaacgacgacgcgaagggcatgatcgcccaggaggagcgcgagctgcggcgagttttcgaccacttgagctcgtaccgtcagaagaagcggctggctcacacgataagcgactgcaaggagcggcgccaacgcttggagtccagccgcaacaaccccgaggtgtcggctctgctcaacgagaagggggccaagatgacgcgcgaggagatcgaggacgagctccgcaaggtcgaccaggccctcgagaaggcggtcgccgaccaaacggccgtgcagaacagcagcagccacagccgcgtggtcaagaacgaggatctgtacgaggctatcaaggcgctgggcaaggtctgctccaagaaggagatcagcgacatgatctgggaggccgacgagaacttggacggcgtcgtggactgggaggagctgcgcgccatgttcaaccgcaacctgctcgacagaacggagcttgagccggccaacctcttcaacgtcgtccagttcatgacgtacgacaagaagaactgcggggtcatcactgcggacgacaccatggccatcctctttgcgcgctacggccagtcgcagctcgagatgcgcatgaagcagctcttcggtgacagcgacgagctcaccttcgtggactacctcgagcgtgtcggcaagcagcggcgctcgaatgtggaagcgcgggcgaaggcgtaggtagcgcttgccactcctctgctaagtaaataatacaacccgataacgctagataagctcatgttgaagttgctggaagttcgctcctgatagggctagtgccggcatatgctgcaatcgacagatgcaggagttggagaatcattccccaactgctacctgagttgccacctcagctgaagctggccagcagtagaatttttcatgctcatacgagagagactcccgtgaatagagcctatctcccaatgataggctttcccggtggtgcttgaaagtgggcggcgcgtgtctaatgcgcactgacatcaccacagagacgcaattgccgacgacaagcagcgcggtgctgaacaaccaaacaatgggcatggactaaagtactccacaagaaacgtgctctcatctgcttatgtctctcttctcctctcgcctctcctcccgattctctctgatagacaatggccggatcggccggcggggtaaacagacagcttagcccagcgtcaggcccaggccgaacttgtgcgagtcgccctcgaagttcttggcgtccacgtgcacgctcgtggtgagcgtcacgtacgggcgcaccttctggatggaggccagcgacaggaagccctccgagtcgatcttgccgcagtacgtggtgtcggcgtcggccttgtaccggccgcccacgaccagcgtgttggaggccgacttgaggtcgtagtccagcacggcggcgtacacggtgttgtgcgacaggtggtggtggaacgaggcctggacggccgcgaagttcttcttggtcacgagcgacgtgacgaaatccgcgcccgtgtagctagcgcccacgttgtgctgcacgatggccgacttgtccatgttgaaggcggtctggccaccgacggcgaagccgccctgcgagagcacggccgcggccgagaccgtgttggacacgaagtcggcctccgagttgacggccaggttcgactgcttgtactcggcgccgagcacgcccacctgcttggcgctcgtgttcttggcgacggagccgtcctcgagcttgaaggtgagcttgaggccctgcgtcagcacgttgggcagctcggcctccgtgaccacgcggccctgggtggtgatctgcagcttcttgaacaccacgccgctggcgccgtgcgtgaagccgcccgagaccttggccaggatcgacttgttggcgttcagcgcgccctcggtcgtgaacgacacgccgttcgacgccttgctcttgatcttgagcttgcgcgagaagtcgtagtcgtcgcgcaggacgttctccgccgtcttggccaggtccttgtacagcaccaccatcgtttgctctaggtctcttcttccgcgcgctagctccacttccgaaatgaaacgcgagccgcacaaacacaccgctgtatcggctggctccacacaaaatctccccctcccgtcggacttaggcgggaaccccctttttggcgggctggagcgtatcttttcgcccccctcgagcgggggtgttgacccccgcctgagtgacgtgctaccgcaagcggtcaaatcttgtccgccgtggcaaatcctgcgccgccggcgctcgagtcgagtcgaggccgtgcggcaatgacgtcgcaaaacagccggtggccgccttcaatgcggtgcggtggcgtgtttcgggttgccgaatgatgcgggtcgtttgacagacggcggcagcagcagcagcagcacagacgcaggctttctcccgccagctagctctagctatatcaaaagtttgctgtttaaagtagttcgcaactctgaccccttagagcgacatgaagcaactgaatggaggggccgaggagcggagaatctcgatggcctgcttcgtgcaggggcaggggattgcatcacgttgcaccgagccgggatttgacttgctctgagtatgccccacaatttttcgtacttagcctggtggcgtagattcaaccccccccccttcctgcggctcgggcccaggttgccattcgcgaaaagatcagccagtggacacacacgtaggaaggagctcaagatggtcgtgctgtacaaggacatcgccaagacggcggagaacgtgctccgcgacgactacgacttctcgcgcaagctcaagatcaagaccaaggcctcgaacggcgtgtccttcaccaccgagggcgacatggccagcaacaaggccatcctcgccaagctctcgggctccttcacgcacgccagcagcggcgtcgtgttcaagaagctgcaggtgaccacgcacggccgcctgatctccgaggccgagctgcccaacgtcttcaccaagggtctcaagctcacggccaaggtcgaggacggctcgctcgccaagaatgcccacgccaagcgcgtcggcgtcttcggctgggagtaccagcagtccaactactcggtgaacggcgccatcgacgtcggcgccagcaccgtgagcaaggccgccgtctacagcttcgacaacgtgctggtgggcgcccaggccgccttcaactacaacaagtcggccgtcgtggaccacaacgtcgcgctgagctaccgcggcaacgacttcacggccacgctgcagaccaagaagaagttcaacacgctctcgggctcgttccaccaccacctgtcgcacgacaccgtctactcggcgctcttcaactacgacctcaagtcgggccagaacacgctcagcgtgggcggccgctacaacgccgacaagctcaccacgtacgccggcaaggtcgagtcggacggccacgtgtccctggccctggtccagaagatccgcccgttcctggcgctgaccacgagcgcccacgtggacgtcaagaacttcgacggcgacgcccacaagttcggcatcggcctcaccctgggctaagcagcgaggggacgagacgaaactcaacgtagtagacgtgcgtctggctagtgctggatggggggaggtgccctggtgcccgcgcagggctgaatcgaataaacacctccgtttgcccatgtaaccttttgcttccttacccatctcgacgtcagagtggtgtgtgtgtgtgccacatgatcctatgtaagctacacaccgcatccatagatacctggccgtcggcacaagtcaaagcgacgcacacaagtgacaaccatgagcgagacggaccgcttcgacagcatgctgctgaccatcgcgcagtcgcagcgcggcatcgagccgctgctggacacggtgttctcgttcctgcggcgcaagaccgacttcttcacgggcgcggagccgcaggtgatcgaggacacgatcctcaagagcgtgcgcaagcaggcggcgctggccgagaaggaccagttccacaagaagcagcaggaggccgagaagcgcaggaagcaggaggcggcgcgcaaggccgcaaagctggagaagaagcagaagaaggaggaggaggcgccgcgcttcgaggagatcacggacgacgccgacgtggagaccaaggaggcctcacccgagcaggcgtcgccccagaaggtggacgcggccgcgaatgaaggggacgaagaggaggacaacggaccacgtacgtgttggctgctgtgctgacctatatttcttctattaacggtgctcttctcttttgttgtggcaatgtggcagcgctggttggcaatggaggccagacggacaagtacgtgtggacccagacgctgcaggaagcccaggtcaactttgccgtccccgagggcaccaagtcccgacaggttgacgtggagatccgcgccggcaagctgcgagtgggtctgcgcggcgctgagccgttcgtggatggctctctgtacaacaaggtgaaggtggacgacagcttttggacgctggaggacggcaaccgcatctgcatctacttgcagaaggacaaccagatggagtggtggaagaccatcatccagggtgatgcagagatcgacacccaaaaggtgcagccagagaactccaagctcgatgacttggactcggacacgcgccagaccgttgagaagatgatgttcgaccagcgtcagaaggcgatgggtctccccaccagcgacgatatgcagaagcaggagatcctgcagaagttcatggcgcagcaccccgagatggactttagcaaggccaagatcaattgagcagcaaccgggactcgagttttgccaggatagacccgtaccaacggctttgcttctcttgtactcgctgaagcactgctaccgctatttcggtggtctaactctaataatactgcctggaatgcccgatcagatcagttcttgtgtcttagcaggtggaagctttcaagctggaaggtgacggtgttgtgagcttgtcacttgtcttttgctcaggagccattgcgtccgatcatctagaagcaggaggaaatggctcgcggtcgccaccacgtcgtgtcagttgttctcgggtcggatgccatcgagtaccagagcagcagcgcagccatgaaccagcacgtcggcgaaaaaccggcaggcacgtccaagaaggcttctgataacctcaacaaagagtgtcatgtgcagttcggagagcccggcagcaagcgcgacttcactacctccagcaaactcgcagacccgacgggggaagtgctgaagtaccgaggggagctggatgtggaggcgatggacatgctcactcgcacatcttcgtgctacggcaacgacgtagtgccgtacgtttcgtcgacccagctcgctactcaatgggacaagaaggcagtggcggaaaccataaggctgcgaaatgagattcgagctcgaacgggtccacgcccaacacggggcatgtcctacgacgatgaggtcgagtacgtttcggaagccaaaagcgccttcgagaacaagttcaagacgcacaagccttcgatcatggccgcgtcagtgaaaaatggtgcgttggttttggtgatcccaacgcgtctcgtttgtttatcgctgctaacgctttggtgcttgcgcagatttacgtgcaacgcacttctctttggggcacgagaagctcgactacaagacatccagccacatcgatcgcctctctccggaccaattcaccacttacgcaacgcgaccctcgcctcttcacgacctgaagaagtccacggtagaaatctcgtaaagctagcccagtccgctacagcaacaacactgaacaagcaatacatcgcgtttgaaatgatgatattattgttcggagcttcgaagcaccgcaaatatgttcacgtgcgccagggcgtgtacaaaagtcttgtcgccaggcaggcggggcgtggcaggtcagctagacgttgaagctctcgccacagccacagctgcccttggcgttcgggttctcgaacacgaactcggacgagaccggagttatctgcagaaaccgacaccatacgttaatttagcctgcctgcatgaatgaatgaaccttgttccgatggtcgaacctggaagtccatggtcgtgccgaccacgtggaatagtgccttgggctccacgaacacacgaactcctaagcacacataacaggaaccactgtaagacacacatccagagaacgcagcattcgtgcaggcgtcctcaccgttcttgctcacttcctcctccattttctccttcttgtccgcgtagttcatggtgtacgacagaccgttgcaaccacctacagttgtaccacatcagcaactcgtcagtcgtcttctaaatgagcccgcaccaccaggacgcactccgtcaaactcgattgaggctctgcacacgtacgcgttctaactcctaggcggatcccgatggcgtccggtttgctggccagcagctcctttatacgcgccgcagcggcgtccgtctgcacgaggaaaacacgcacgatcgatcgattagacgcggacttcgggacctcagtctcatctccgtcgacgcaccaggttcagcggcggcggcagctcgcgcaggcgtcggcgcgtgggcggcgtcgcgtgctcggccgcggtggacagcaggcgcggcgcatgggcggcccgggcgcgcgtcacagagcggaagagcggagtcatcggcggcgttccggcggctgggcttcgcttcgtgagagccgctcgagccgcaacgcaaaatgccttacccagcacgcgagaactggaccgcctacgcggattggtcactaatcgcgcccgaaatagctgaaatagccgccttttcgacgaatccgggcgcgtgcccatccccgtcgcatttaacagcgcagcttcaatgacgcagcggtggtgggcttgcttggtagctgctggtgtcacctaggtaagctttgcattggttcgagtgtattatagctagctactacgtgtctgtcagccgaagagctgctcgcgcagcgtcacgagctcgtccttgtactggcggatgagctcgcggagcacggagccgcccagctggaagttgcggatgtagtccaccttctccttcaccgtccgcgtccactgctgcgccttcgctgggtcactgctgtccggcgccgtccactcgaagatgttgacgagagggtcgaacttgggcgcgggcgtgacgcccgcgtccgactcgtccaccggaggcgggttttgcggaacggcggtgttggcgctggcatcggctttcacctgcatggactcctctgtttgctggggctcctccgttgccagttgaagctccgtttcagcagtggctgggtcgttttcggtcggcgcaggggcttcggtgtctgcggcggctggagcttcggtcggtaattcttcgccaggttcctcgggtgccggtggtgtagattcgggttctgagggttttgccgctggcggtgccgtctctgggaacggcttgtcaccccaccacttgtcgtagatgtacttctccaccgcctcaaccttcgcgtcgtccagcaccgcgttgtaaatcagcatctcggcaattctgccctggaatgcgtttgtgtcgcaagcgctcttggagttacccaggctcacgacatcgttaacggtgatccgaagtctctcgtcggcgtcgccctctgctggagactcaccaccccacgccccaccgttcattttgatttcagcataacctggatttaaacgataggtgagcagcgaaaattgccccataggtaccatgttctcgctctcgaccaggcccatgctggcgaggaacgagggcttgcccccatgcaaagcgaactgcccgtacggggagttgccgaagaatttctggcctgcatacgaatcgccacgctgcagacatatccacaagagtcagcatcctatctgcaaggtagttagtcgcaccagaacaatcgtgaacctcattacctcaatttgagcaggggaaagcacgaaaaacagcgtcatggactcgtgcattctcaacgcgtcggagatcatcggacaggaaaagtacacagctgggagctggttgtgcgtatctggcaccactggcacccacacaggtttttgctggggcgaagcagctcgaaaagctgtcgcgtcggcagcattggggtctgaactcgccatttggttgatccacctagacagagaaacgttagcatcacttcgaaactcgtaggtgattgatctccgagcgtacctgttgatgccacaagccacgatatcgtgtcctgaggaggccaaacacgccgccaggttctccacttctactcccgagtcagccgtcagccacgttaccaagttatctacaaaggctggacattaagactgaagttagcttggatgttcttgctactagcaagtagatcaaaccatgcatacctttcgactcaaccgatgcaggttcaatctccgttgaaaactccggcgctgctgttgaagtaggagagctttggcttgcttcaactggctgctctggtgataaagtttccggtaaaggggcttgagattctttcatctgcgaaataagatccgcaatctcggcttgagagggttgaccagggcgtggcgcgttggatgctggctctgcagatgtgtcgctggacacggttggtggtgtggttgttgttgctgtgtcaggatcgaccgcagtctcctcggtcaccacggtatcgctgtcttccgttcgcttttcactctctgaatcacgcaatggatcttcttgagtgcctacgtttgccggggtgtcagcgtctgaaatcacggttaatggttcgtctgctacggcctcggtagtgtcatcttggtcaagtagctgctcttcttcatcagtagcggtggtgctcgtcactttagtgtaacttcccggtcgaaatgtttcttgcacttggggttctttcgtagcttgtggttgagtttctgatagcgtgaggggttgatacacagtttgggggactgttgtaggttgctctaacgcattcgatagaacgctgtccccggatagagagggaaagcgagtggaactcataaagataaaggtggtgacaatggccaagttgatgaccaggatcagcctggagcagaccatcgggtgaatctcgagttgtaaatgggaagcagcgtagttgcaaactccgtgcatacgtaccatatcttgccacggggcgttgagaaggacacacctctagactctagccttggttgatgcgaatccccctggtggataccttcattgccgtcgttgtccccatcgtcgtcgctcatgggggcgacgcgcccctttttgctccggttgtgctttgacaaacgcattgctgtgtagtggttggtaggctaggtcgcgtcgaccgcacgctgcgagttgcagcagaccgaccgccttgcgtctattgctcggcgaatgcagatcgcgactctactaaacgggcgtgacgcttcagatggcctgcaaccccaaattggccaaacccagcaatcagtatccgggacggcaactcgcagattacctggtaacatcaacaagctttgcatcacactccgttcacatttcgcttctcggagctgttcttgcatcagagatccaatcgccgaatctgcttatgtaataccacgacagctagcgcttcaacctacatgcctcgcctcgcaatgaaaagccgtagctcaacctgctcattgcatcaaccactgctgcaacaaagtcgagaacctcctcagttttcctcaatttgaagtggagcaaaagtgcgcatattcgcttgtgttgagcttcctgttcctgctctctcctctgctcccgcctctgcgctacatctagtacgggtccgtctcgttgagccacttgtccagtcccttgagcggcttggcctgcttgaccgccttcttgtgctctgcgatcttgctgggcatggccgccagcgccgcctgcaccttcttgacgctgtagcacacacacacagacacacatataacatgaataaccagtccgcctcgacacccagcagctccagccactttgtcattcgtcaatctacccaccgctcgaactcgttgcgctggttcttgtggcccttgagcggccgcatcacgtggtgcttctgcggtcggtcccaggtctcgagccagccgcccttgccctcctcccacgtgcccacgaggccgttgcggaacgcgtgcttcttcaccatggcgatcttgcggccggagatcagcggctgcttccacttgccgtccaccagtcggggcttcatggcggcctcggcctcggccgcgctcaggcggaggaatcgctgcacgccgctcatgggtcctgatcgatcgtctattgctccaagccaaaccagcggtttgcgtgcgcccgattttcagccagtcagacgactctgatagctttttgaccaattaccataaaacgtacttactcgggagaccgaaggcgcgctccggtttgaaagcattcacccagcgatggacatggcggccgccgccccgcagatggccatgaaccgggcctacgcggcgccgcagcagttccagcagccgcaggagcccaagcagatcacgacggagcaaatccaggtgtgtctccccacgccgtcgcggtgctctatctccctctctaaccggagatacgccttcctgtttccatgcccccacgcaggccatgctggacgagaactcgagtctcatcgtggagatcatcgagctcaacacgcagatcaagcatggcaagggcacggcccagctgggggagttcacggagaagctggacaagaagcgcaagaacctcaacaagaacctcatgacgctggccaagtgggccgacgagtcctccgagacgtcccccaggcagccgcaggcttacggccaggcccaaatagcacagcagcagcagtacgcgcgcgccgaaatgatgcagatgcccatggccaaccaggcgcagtaccaggcccaggctcaagcgcaagcgcaagcgagggcccaagctcaagcgcgacttcaagctcaggcccaggcccaggctcaagcccaagcttacgcacaggctcagtaccaggcgcgcatgaaccctatgatggctcagcagtacggccagatgaacgtcatggcccagcagcaacagcagcagcaacaacaacagcagcaacagcagcggtatgctaacggcggcatgccctacggcgtcccgggcagtggaccgatgtcgcaccccgtccgcatgagcaacgcgatgcagatccccacgagctacgcagacaatcggaacgctatggcgcccaacatgggctttcagatgggcccgcagggctacggcatgatggctccgacgcagatgcagcgcatgaatcccgcgtcgcaaggaatggccccgcagagtatgcctcagcaggggatgcagcagcagaccatgccccaccagagcatggcaatggggcagcagaacatggcgatgccccagcagagtatggcgatgccgcagcagagcatggccatgtcgcaacagagtatggcaatggggcagcagagtatggcgatgcctcagcagagtatggcgatgccccagcagagcatggcgatgggccagcaaggaatgcctcagcaggggatgcagatgccccagcaaggcatgcctcccatgcagatgaacgccccgccgaactcgggcgcgatgacggacgcttcgggccgcccaagcagctaggcgctccaagagttctaaagcccatagctaacacgtcgtcgatgaagaatccattttcactatacttatattaaacttgctgccgtcttcgtctgcatggagaaggtcctccttagttgaagccatcgcgtctcgtcctcctcgcgtccgccacaccaaattgccgtcggtttcaagccgactacccggtagtcaaaaagcgatgttcgaagctaacgcacatttggcgggaagtcgctgaagagctttttaggttgttgcccgccgcgcaccagggatggcgtcccagggcctttcgtcgtggctgagcggccccatggcggaggccgcagaggagggtgcagaagagcaggacaaggccaaggccagctcgagcgactcgccactggacatcagcctcgcccagctgcgcgccaaggagaccatcacgagcatcagcccggagaagcgctcgctcgtggaggagatcgacagcgaggcggacgacaccgagttcgacgagagggcgcactgggccaggcgaggcagcaggaagaaggccagggcgtctcgcagagccgccagggccgcggacaagtcgcagccgtcgattgcgctcttctgcgtcaaggaggcggctccagccacggactcacaggagacggaagccgaggcggatgcagtcgccagtgccattgcagcctcccaattggagcagagtcagaagaaggagaacagcaagagcaaaggcaggaagaagtcgaagaaggcggcagtgcagagctccggactagaggccaactcggccgtggacggcagcaacaaggacgaaggtgccagtggtgtcatgagctctggacgccccaagcgacaggcagttgtacgcgctgagatcctccagcagcagcagaagctgctcgatgccgttgcagcgaggaaaaacgccgctgcattcttgaccccgcccccgtcgacgaaaaagaaggcggaggaaggcagcgccactaccagcggacgcaaacggaagcttgatatgaacaagaagaagtcatcgccgcctacaaagggcgcaccaccatcgagctccccaggctccagcaaggcggcgaagtctttctttttgagtgaacaggagaagaagcagctgcaggagatcgaagctgtgtcgtcgttccgtgagcagctccggcagacgcgcgagaaggacctcgccttctttgcaggcaagacggcgaatccattcttccaggcgcgagctgtcaccaaacgaagcagcagcgcagagaacagcgacggtgtcgttgagcttcacgaagatggcgaaggatcggatgccaagccgcgacgtggagctggagggggtcgctggagcaagccattgccgctttttcctggagtgcagcacgtgctatcgggatccttggaagctgagggcatggacactgacgcgcaagaaggatcgatgccgccgaagaaagcagctccagcagcagacagctctaccgcagtagtcgtaatcgaggatgacgcgggaggagatagcaggctgccgtctgaagtgatggaccacctgaaagcggccatgaacggccaaatcacgacggagtcttcgttttccgagcagttttggttccgtgaatacttggactcctcgagcctcccagcgccagttgttgagatgatcgatgttacctcaccgaggccagaagaaagtgctgagactgcagcagcggaactagctcagcgagagacgttgctcgttgatgaactggtcgagacccacggtttgcgcgagaaacgagtccgtgaacttcttgaaggactagagcaggccagggccaagcgtttggatcgcgagcagaacttgtcgctggtagaccggtacttgcctgtgaacgcaagtggactggttggcaaccgagaatcacttcatactctgtcgtcgtggctgagtgcgtggaaagtcggtggtggcgaccgtgagagactggactgctttgaaacggagctgttcacgtttgaggaccacgacagcgatagcgaggacgaggtcggtgatctgtgtcgcttgtttattctggagggcgagtcgggctctggtaaatctgctgcagtttacgcgtgtgccgaggagctgggctatgaaattatcgagatcaatgcggcccaaaatcgctccggaaagagcattgtggaactcgcgggcgaggctacgcagtccactcgagtgttgcacgtgggtgggaaggaggacaagagcaagaagaagaacaagaagaagcgacgaagacactcagagggccgcaaaagcttagataaatcctctgcagcgtcactatcgctcgtgttgtttgaggacgtggacctggtgtttgacgaggacaagggcttcctcaacgccgtgtgctctatcgctaagcacacgaagtgcccgattgtcgtaacctgtgcgcagctgcctgatgggttccccgcaaaacccggacggttgtgccgcgagcttcggaaaccctcaatggacgagtttgccacctggatgcggttggtggccttcattgaaggactccagctagctccagcgttaattgatgcactgggcaagttcttcgagcgggatgtgcgccgctcgcttcatttcttggaggcgaatttgccggtgtcgaatgcggatacaacgactcagtggcgctggcagcatgacagcgaacgtcgcagcgatgctaatgaggctcgccacgttgacgtacctgcctggactacttggtcgactgggtgttcttcgttcgacgccctaacgagcaatctgctggtagagttgagcgctgtcgctgcagacgaaaagaaaccggagggcaaaagccgcgaagaaaagcagcaagacgtcgacgcaatggcggagctcgcacaggtcatggatgctgcttctgttgcggatatttggatggcaccagcgagggcttccaccaacaggaacgggtttggcagcgacgatatcgaggtgagagaggagttgggtatgtagtttgatcgtccgcgtgcatcgtgtctaacgatgtcttcttgctggcaggacttgttcttcctcagcgaacgcgagcaatcggctgctctggagctcagacgatccagtctacacatgctaggatctttggctaacccactcggtgcgtcgctaagacgaggaccggggcctagcgcctctgtgtgcgtgcagcggacactggacagcgcgctagaagcctcgcgtcgacgtgctcaccagtcagcgctggcacagctgaagcctaagttcgagctgccactggcctacaaagggtgcgttcctcgtttcactgctcgaccctgcagctatgtcacctcactctgtcttgcacctgttcaaacgtagctgcgggaacttggagccacgcttcgcgctcgactacatgccgatggtggggcgcttgctgttcagcaccggcctgcaagaaggtcggcgacggacatcgcgacggaatcactatttaggcgacgtgctgggggacatgagcctcatcgacgagctgccagccttcaacacgtacttgcaggctgacgaggaccaaatcgtcgacgcctccccggcgtccacgcagtgatagaggtagaagaagaaagtagaagtatctgcatctcgggacgatacaactaagtgcatcccccccccgctcctcctgtagctttgtaatcaccagaactcttccatttggactccttcgtcactccctccctcctgcctgcctgcctgactgtcttctatctattccgtggtcttcttgaccttggccaccacacgcttggcgcccttgccgagcacgtccttggccaacgcgtccaccttcgtcttgacaatctggttcagggacgcgtggaacgacgcgtggttcacagccgtcacctgcagcacaagtcgagtcagtcgaggagagctacacacatatccatccatcccctctgcgcagtccgtgcgtaccaccgtgctgtatttcttcttgtgcttgttgttgccgtactggcaggcgcggaagagcagcgcgttgtctccatcctccaccgtgagcttgtggatctgctgctgcgctttgctgttcactttggccacgggcactgcatccatcatgtcaccacaacaacatgtcagcgcattgcaggggacgagtgtcgcactactgtagcaggacgcaccgctcttgcaggagatggccacggagcccttggagccctgcgcctccgcgtagaactccgccaccttggccaggaacgtgtccgtactgaccagcaccatgttcccccggctctgggatgatgaaaacccttttgcctagaatctggaccaggtacagaatctggaccaggtacagattccagacttctgatgtagtatccaaatatggccgcctgtgtcggactccccacccgtgtctgcccggcgcccctcggctgcgcccgccccggtcgacagcaagacgcccccggaggccaaggataaaacgaagaagaagaagaagaagaagaagaagaagaagaagaagaagaagaagaagaagcggcggccgagagggccaggcggaaggcgtgcatcgccaggtccttcttgtccagcgcttcctcctccgacgatgaaaagccacccgcaaccgttccagcgcatcgcatcgcaccatcatcacccccgcgcccgtcctcggaggtcaagccatcggtctcggcgtcgcgcaggaacaggcgcaacactgttagggcccgatcccgatcctccgactcgagcgtccgccccgacgcggaggagaaggcagaagcggtcgtcgaggcgccgcccgtggtcgacagggagacgatggacgcgtcgctgtggtgctgtataccgccctcgaacgacagcgacgccttgggctcaccactcgaccgagacgacgctgggactgacgcaagggagaagagaatcgacgcttttgtaaagctcggcctaaaacctccagacgctaagtggggcccccagaaaacgcttcgctacctggtggccttttcacttttgtcgtctgcagatctaccagttgtcagtcttcgtggacatggacgagttccccagggtcatcccgggcggcaaaatggaactacttcggctatgtcgtcacgagtctccttcacgagtgtctcgtgaaggagagacacgaaaactcaatccgctatgtcaaggacagcgagttcaagatcaaccaaggggcgaggtgctgggtacgccttgtgtacgtgttcgagaacgctgcgctgcgcgactacatcaggagcaagcgtggagcgtacgttgatgcaactgcgccgaaggacatcgccggactctacaacctcctcggcaactcggaggagagggcgatggacgaatggtcggagaacaactggataatgaaggttggcaactccaggaccagtgtgcgagatcgcgccgcggcacagatgacgggggcggctacttccatgccggctagaggagagtcgtcgctctctttctatggcgcgctcgaccgcgacgacagcgtgagggcggagaagctggcccacgccaaactccgctctctcggattcggccacgcaccgagcagcggcaaagatcagttcgtggtttgccaacacagctatgtgctgttccacgaagtcatcgtggaggtattcaagatcttccccgtcccggaccagccaacacaagcttctggcctggtcgaggcaggccccgcgtcgctgagcaccgtcggccagaagggtcggtacgtgcgggaggtggaaacagctcaggcagcagcaaataaggcaaaaaagcgtccccggagttgagtctctgaaagctggacctgaaattcagacgcgtttgcattttagacacacaagctaacatggctacatgacagtctgctgtcgactcactcgaccatggcaatgtccaccaggtcgcccggatggaagcgcacgctcgcgagcgtcttgctgtcgtccgcgcaccgacgacggctgctgttcacgtagccaaccttccgcatgagcactctgcaccaccagcacaacaacaacaaaaagcagtcagctgtcccagctcgtcgacgacgccagcaatagaagtgcatgcaatacacgcgcaatggtaatagcaggaccctcaccttccgtccctcgtctccgacacaacgcagatgctgagacgcatgttgggcttctgggcttcggtgttcgagtcttgcaccaggtctgcgatctcgcgcagcgtggcgtcgggcctgcattgacggtgcttcagcaacacatcactaccaatgaccgaaaccactgagaccgcagcctaccacgtgtaaatgtgcagctcgttggcgatcggtttgtcgtccagggcttcgaacgcgtcggttctgcagcggcagaccacccaaatccattgcatcgcagtcgcagtcagcgccgaaccaccagccagccaacttcaccagagctgactgaatctctcgtgcctgttgtgcgcccccatgctgaagaagacgcgcagcaggaaggggcagtgtttctcgcggtcgatcgggtcctcgagccgcatcctttgcttggatgctctttgaagagtgtcaactcatgggatcgtactttgcagcgttagtggtacaccgtaccactccaccacgcgagtttgagcggtggtggcagtccaaagcgcgcagcaggcaacagtaagcagcaagatggcggcgcgcaacgtggttcgtttcctcaagtcggccaaggtttccttctccagcttcgaccggcaggcgacgggcgcctggtgagtggcagcggcagtcgatgcagcgtgctaattatactgcggagtctctgacgtgtcatgtctgctgtggacgtctgcagcgaattctaccggcagctgacggccgagaaggtgagcgctgcagagctctttgtcaagggaaaagtaaggagacggtgccctgactgcagtgttttatcttctattgacaacagacgcgcaaggtgaaccccaaggccgagatcgcctaccagacgtcgctcacgggctccgtgcccaccatcaagctggacttcagtacgtctcaacattgatccacctcagcaatcgttgagggagctaaccgctgcgatgttgtgctatgattttgttcagtcaacggcagcaagcacgtgatggaggtgcccggcaagaacgtgcgcgagatcttcgaggagctggattaccactgctcgcagatcgagacggagtacgagaagcagggcaagtccatcgaatagacagtcggcagaccgaagacaacgcaacagaggtggcttgtgctactcgagttgatgacagaatatacaggggagcggatgagtttgaacgaccactgcgttgctttccaacgtgcgagtctgtactggagacccacgcactcgattcaacacgtgaacacatgcattgagcattaaatagcctagcctcgtcactgcggatcgacaagcgcgatttctgcctgcacctcctgctcaaagtctggctgcgaggcatacaaattgagcgtcttggcgcgttgcagcgacaacttcaacaggtgctctctgcacgtacggctcgagcctgagaacaacataccactcaggtgagcacagctctactggcgattgcaacagaccaaccaccgcagtgtccgtaccgcacacgcgagccactcggatgctgacgtcttggttgtgcacctccgtcacgaacaccagtgacgtctccaccatcttgcacatttcacgggcacagcgaatagctgctagcctcgtgtgcgtgttgtagtaaagcactgccaaggcaacaacaaaacttgtcagcgttgcacgtcataaaccacgtcataaacccgagctctcaatcacccgcccaccttggaatgcgtattgggccagccccgacccgaaatctccgtagctcttggagatggattcgcgaatcagcgccgcgatgtcctccttcttgaccgccagcttgcgagcgcccgtggcctccaccaccaggtagcgcgttttgagccgcaccatgcttgttgcagcgccaacggaatcccaactgtgaatttcaagtttgacagtaccggccagccaatccgcggccgcgaaagagtggatggacgcagttgacatcatgagcagcgcaggagacgtcgcggtgcccggccagcgccttgcggcggcggacggcaagctcaaggccggcagcggcgcctacgtccgtgacggggccatctacgcgtcgatctgcggcaagtggcgcatctcgcaggacgtcgtggaagtctcgcgcgccggcaagacggtggcgtcggcgcaggtgctgagactcggcgacgttgtcatctgccgcgtggccaagatcatgtcgcggcaggtgatggtggacatcctgtgcgtgggtgagaccgtgctgaaggaggccttcccgggcaccatcaggctggaggacgtgcggaaccacgacatcgacaagctcgtgatggaggaggtcttctcgcctggcatgctcgtcaaggcggccgtgctgtcattcggcgacactcgctcctacttcctgtccacagcgaagcccggcttgggggtcgtgcgtccaccaacaaagcaggacagccagacgaccgacatggaaaccgactagaattcgcaggaatgtatacaaaaacaacagctagaccggtggagccacaacctgctacgcaaggaataaaggtgttttccattacggtcattgctgacagcgtggtgtgttccgttctctgatgactgcttgggcaaggacgtttaatcgtcgtcttcgtcagaaccctcctcttcaatgatctcaaaacgcgtgaaaggcttgtcggactgatccgcatggtgttcatgagtggcctggttgttcttgtgctcgcttggcttgcttccaccagcaccactgtcgtcttcatcgtcgtcgtcgtcttcgatgatctcaaagcgcttgaacggcttttcttctacttcgtcttgagggtcgtccttcacgggtgagactgcctggtttcctgacaaggcaccattgacctcctcgtgtttttcctttgcggcttttaacaactttgtcacctctcggttattgggctccagtctcagtgcctcctcgaagtcttgcatggactcagcgtacttgcccctccggtagcgagtcattcctcgacgactccaccccttcatgtatcccggatcgagtagaatggcgcgcgtgcaatcatcttccgcagccgcgaagttcttcaggcggagatgaaccaatgcacgattggcgtaaaggatcgcgtcggtatcgtcgtatgccatactgcgagtatagtgcagcagcgcgatctccagctcgttcgccttgaagcagtcgttccctttttgcttttcgtagcccgcgtacaactttcgtgtttccggctcaagtttctcgagttccaccgacttgggaagcgactccagctctcgctttcgtgccgccgctcgcttctccagctcttctcgctgttttttcgcctgctcgcccgcccgctcactctcttcgtcgatttcctccagagccttgtcaacgtcgtacttctcccaagacctgaaatcgtacgctgggatcgccttggatttcttctcttcgctcttgtctacgttcacaggggctcgcgccagacttgacttcgtgtcctcagatgacttctgtcctcgaacaggcggtagctctcgctggatcggcgtttgtttcttgagtgcctcgttcttgaggtccatcgccgctgcccagttcgcgagctcgtcgatctcagtggtcagctcgttggcgctcggccccgagcgcatccgcacgatcttggtgcgctctcgctcgggcagcaccgccagaatgcggttttccgtggccttctccaggtcagggtagcgccattccttgcccgaccggagcgtcgccaggatccctttgagctcgtccaggtcggtgcagcgctcgacgaagccgtagtccagcatctccacgtcgatggtcttgggcttgcgcgtgtgcagcgagaagaagtccggctcgggcgccgcgccggggctggagatcgtcatgctcgccgtcgtcttgcaaaatccggagtgcggatccttttccttccagaaggtcgtggcgcttcagcgtgcagagtgatggtcactaggttgaagtttatttttagccgcgccggcagctccgccttccgcgcactgcagcggccggaaactgcaggaatatggacacggcggaggctcgtgccggccccgcaacaggaagcagcatagcgccaccagctccgacccccgctggagctcccgctgctcgcttggagcacggacgcgcgtccagacacgaagacagcgggctgctatcggacgaagacgtgcgggctcaaacataattggactagagggagggttgtgactgactctggcttggtgttcggctgctctgcttagttctacgacgcgcacgaagacgtagaggcggaggcccatcgacaagcgtctgcgggtgcgtacagaaggcgccgcggcactaagatctgtcaaaatactaaccgctttcttggtctacagctgcaaacgcggcgacgaatcagcaatccgggggccctgagctggagaccaagctgagcgacccagatgacagcaagtacattgtcaagaacaaggacacgggcgaagtgttcgacatccgcgacttggccagcatgccagcggactcgtactccatcttcccaaacaacttcgtcgctccccaagaagaagaggtacgtggaatatgaactcgggtgtgcagcacacaggggagtgattgatcaggtgaacttggtccaggccaaacgaaccaaaactaggcgaccgtcgctgaccaagatcatgtccaaattcccgatcaagtccaaggcgaaagaaccagtgaaaaggaaccatgttccggtaccgcttcatgcaccaattgcgctgagaagatcatgttcactatgttctaacttcattcatcctatctaggtgacgtcttgcaaaaaggaaaagcgagacctcgacgatttatgcctggcgcagacattatcgaagcacactggcacgatctggacaatgaagtttagccacgatggcgctcggctcgtgtcaggaggtcaagatgccatcctacgcgtttggaaggttcaaattagctccgaagaagatgcaaaggttgcaagagagagcgatgaaaagcagattcttgatgctgagcccgagagatcgtaccaggtgaggctgcgtattgagccactaaaattactggagttggtatccacacaaaactgaccgtatcgctgtcttaggggcacacaatgccgatcgtcgatgtgtcgtggagtcgcagcaacttcattctgtcggcatcaatggacaaggtcagattttagccatggttcgctcccatggtagtgctttgcctggtcctgacttatgctgttgccgttccagacggtgaggctgtggcatatctcgcgcgaagactgtctgcatgtatttcatcatcctgacagtgtgccagcggtggattttcacccaaaggtttgttgagtgcgatctcttatcgaggtctacgaacattatctgatattggtgctttcacaaaataggaggaccgatactttttatccgggtgcttcgacaataaagcacgcgtgtgggatattccagacggttgcgtggtttcctacgtccagacaccagtgatgatcacagctgctagctttaaccctagcggcacccgtgccattgttggcttactgaacggccaatgcattttttaccaagtcaactcgcaccagcagatgaattactacacgcagattgagtgccgaaacagtcgggggtcgatgagaaaggggcgcaaggtcaccggtatcgagtttgatccggagggcaagtatttcttggtcagcacaaacgactcgcgcatgcggcttttctcagtcgacaactattcccgaatatgcaagtataagggcctcgtaaatggccaccttcaaatcaaggggagattcaggtacgacgaatactttatgatgttcgctcattcataacctgacatcgttgcacttctagccaagacggagacttcgtaatttgtgggtccgagaacggctcggtttacgtttggaacaaagcaaggtttgttatcctgtcgcaggaaatgtagttagttgtctttctcaggactttgtgcgtgccgcagatacctcaggtctatgagcatcgtgaaaagcagcaagcaggatcgcaattcctcctacgaattctttacaggtatccatgttcgaatgagtcaatactgccaactgcgagtttctccgtcatttaacattgctttgtgctctagctgctgaacccccgaacggcattgtcactgttgctttgtttgcccctgccagcactttcgctatggtcaagtcgaagctggaggcaagcgacgacgtgaatacgaatgcgtgcacagggttgattgtgagcgcgagttacgatgggtgcatcaagtttttcgagcggtccgtgaagagcgtgtaggtggggaagcaggcgcaacaataaaaaaaatagaattcattcagctgaatgtggcgataaaactataacaatattcccacacggctaaaccatagttctcgcaagtaaaagtaaaatatccataggcccgtatcctgtataacggtggcgatcaacctgagaggttcaattaaagagcgtgcaatactcggctgttctgctgtcaatgtattttttgcatatgtagtagggaattctccgcaacagtgctctattcgatgccgtctatcgatttcgtctagggcacgaaaggctgctacttacaaactaaatggtaccgtcaactaacaacccagcaaaactgcaacttcgacaacttgaaggagtctaggattggtgctgctggccgaccgcgacgatcagatcacgcacaaacgctttgatgtcgttttgcgtggcctgaattgtctcgatcacttcctcgtggcaagcggcaggggtttgttcccccggaaagacagccttgttggtaatgacagagaggccgatcgtcttgagaccgcagtgggcagccacaatagcttctggggccgtgctcatgccgacagcatcacagccgacgagtcgcaggaagcgggcctccgtcggagtttcgtacgtaggcccggaaacgaagcagtatacgccacgtcggaccttgtgcgcgagaccagggctaagcaaaatacaatataatattgattggactctccaacgttccccaattagtaattggtttttccccccacaactcaagtgtagagttaaaaaaagagttgagcataaaggcgagaagaacaaaagtgtttagctcatgtggatagtttacttcggttacccatcaccgtacagcatatcctacacttaccaaagcatgccttagataccatgcacctgtaattcagatacaaacctcaagggttcgaaatttttgtttttagtatatcgcattctattacaattgagctcgatttctgtaagattttcacagcaaaagtaagttgcaatggcttcttactattatatacttattagtgtttttaaactcctcttgcacaccatttgccgtcgaagtcatggggaagtgatcataccaagcacacgttgtatagatttcagcgccagacttcctattttttattgcacgaaattggtgacggggtatcagtaagttattcccataagttactgcgagttattgttacggatattggaatttaccgagccctgcgcgagaccgagtttctcggcaacgccgagggccaaattctgcaacttctcgtcgtagcagttcgtcagcgagatgaagcgaccgccaaaacgcgtgtcgttcgcggtacttgatgcccaggagatacatgttttggatggtgcacttgttggtccgtacggcctggagccaccactagtaggaaaaaggaaaaagattgaatggctgagcctcccagctcttaccactactctcgggcttgagcccgtttctcatgcaacgacccgcagctctcagctctgctaattttctcaggtacctagtctcagctttcgcccgggtctcaactctgaccttcaacttggtcttcaatgtgcattccaacacgcctccctcgaagcatgagcttcgactaatccgcatcaccaatgccggccagccccagcatgttctgcagacgcagcttgtcgagcggcttcgtgaaagtgtcagcggggttcacctcacctcttatcttgtgcagttcaatcacgcctcgttcaacttgctcgcgcacaaagtgccagcgcaactcaatgtgccgggtgcgacggctgtacgtaggattcgtagccatgatgtgcgcggcttggttgtcgataccaatgcgcagcttcagacacttgtgtggcagtatttcctgcagaatgttgctttctgcaactgcctccattgtcgcttcacaggcggccacgtactctgcctcagccgtagatagagcgacgatgggttggcgtctcgacatccaggataccgccccaccagccagcgtgaacacgaaacctgtcgtgcttttgcgggtctccgggtcgttggcccagtcactatcgcagtagccctcaagcaccacagtcttcgactcgctcgactatcggtcatacgtaattccatagttcacggtacctgcgaggtaccgtaggactcgtttcagagccccaacatgcttgctggatggctttgctacaaagcgactcagctggctcagtgcgaacgccaaatcaggtcgggtactagtggtcagatacattaacatacccactgcctctcgatatggaaagctggtgccgctttcttcatcatcaccaagcggcacgaggcgagcattcacctccatcgggttcccaaccgagtgtgcctcagcgtagccaaacttctccaaaatttctcgagcgtacttgctctggtggatgacgaagcggtcagcggtttgctctacttccaccccgagatactgcgtcaaaagtgcctggtccttgagtccgtactccttgtccaggtcttcgaacaacttcttcttctgcttttaatccttggtcgccaccaagatgtcatccacatagaccaaaaccagcatgatctcctcaccttcaacatgataatacaggcagggttcagtcaaagaccgttggtagccacgatccagcatccaccggttcaactcggtgttccattcacgtccagactgtcttaacccatacaatgccttcactaccacgtagatgtgtccatccacttcacaggggaacccctcaatcgacctcacatactgccgtattcctagcttcgcgttcaggtatgctgtactaatgtctccgccatagagcgtcagattcagtgctcctgctagtccaaccatcaaacgaaacgaagatatacgagccacaggcgagaacgtatcaccgaaatcgattccagggcgctggcagttgccaagtgcaaccagcctcgccttaaagcgaattacctagccttggtggtccgtcttgatatcgtacacgaatctcgtcttgattggctttgcgtccttgggcacgtcctcgatggcgatctcctccagaacatgttgtgccctcatcgcagccatctcctccagctctgcccttatgaaaaactcccggtacttgctacgtcgagactccctgtggttgcgaggaacgcgtacatcgcttgctcggatcggacggccattctaatccaacacccgtgacgtgttctgcgtcacattcatcacatagtcccgcaagtaggccgggcgccgacgctgatgatactcgcgcagcccagtgcgccgagttcgctttggctcctgcctctcagcactctgcactacacgaatctcctcagaaggggtctcgtcacgttgacgtttccccatcaattttccacagacactcgcaacagtagtcgcttcctcatcgtcaagttcctcttcagcagccactgcatttccatcatcaagttcctccgtgtcgcctacgtcagatccatactgaccagcaaccgactcgctaccgtcacaagatgcagcatcggacgttgcagcaacatcgtgtttgggtggtgaatccatagccaggtgagtctatcacggatgagtgctgctctcgttccgtgtcatcactcggacgatcatcctgactcccagtcaaaagctcactctgcaattcatcaagctcacactgcgtttctgtctgcgtacgtcgtatttctgcaggctcactgggtagtgctgccgtcactccaccaacatccgccacactgctagctggtgtcgctcgagacgcctccctggtatctgtgcgtgagcggccactgccactcggaagtgcactcaaatctccacttgcctctgcgcttggagctgcacttgcgcttggagctgcactcggagcgccacacatctcgcctctctcgagatccacggtcggtccggccatggtctcgtgtaccgatggcgcggtggcagtattgccttctgcttccaactccatagtagactcatagagtgtcgagacagcgtcgtcgtcctcgacgatcttaccagattgtacaaagtgcaaagactccaagtcatcttcctccacagttacttcatgtctgtcgcggtacatcacatcctctgcaacacggaggtccgacacaaattttgctgtgcgattgtccgggaaatacaccttacagcctatcacgtcctcagcgtagccgagtacgaaacccaaactggcattgtcatggtgcttcttccttcctggtgtgaccggtacgtgaacgtatgcgagcgccccaaacttgcgtacgtgatgcaagtcaggcttcacaccaaacagcatctcatacgggaccccacctgtgcctttgttgtagatgcggttcttgatatacaccgcgttccgtagagcctcaggccacagactcttaggaaatccagcatcgtgcatcgacgccttcatcatctccacgagagactgatgagtccgctcgcataagttcaactgcgaacgcttcgggccaaccagaacatgctcgataccatgagccttataccacaactccatctccgtgttaacaaattctccacccttgtctgtcaggatttggcaaactttgtatttgacgtggagcgttctcgtcaaaacttgacgaaccttgtgtcgaccagcttgtctttctgcccacaacacatatttcttgatgtgtcggtttaccacttcgctagacttactcgtaagcaggtgcagcgtcacgaatctggagaatccgtccatgatgacgagcacagcttcgaagcgagtaccgttgtccttgctcgggatcagcaggtccgcgtagaccacttggtttggcgttttcgggttccgctcgagcttctttaggtgcggcttcttgttttgcttgccaatgtggcatgcgtcacaggcaccaaggtcgcgctgcttcatcagcatgccacgtacgagccctttgtcgaccatcaccttcagatactgggggcaagtgtgacccagccgctcatgccacagcctgagcgatgccacaccgtccgcagccgtgaagttgttcagaagctggtcctgcagtccgacgatatcaccattagacgggtgggtaacctggaatccccacgttgcctcatgtggacttgccacaatcactgtcctcccttcatcttgcactcgaaagtcctgtgactgacgatcataatcaaaatcaaagccctgctcagcagctagtccaatggaaaacaatccgtgcgtagcaccaggcccgtaaaacacatcgttcagagtcactgtagcttgttctccatcaaccgtagtaatcagcgctaccgtgcctactccagcaattcgcgatgccaaagcagcagtcacgccttgaatatgctgggactgactcggatccggagtaaaggcaacatagtaccaggggttccctgtcacgtgcatgttcgcggcggtgtcgaagtaccaccagccactactggtgtttgcttcgccttcgtcatggtcttggccgtcataccaccagccaacatgcgcgtgagagtcattcccttcctgtacttcctcatcctccgatgtcgctagtctctcagcatcaccagaatcagctgacaaactgcatcaattatcagagcgtccagccgactcgccgactcgccaagctcagcgttctcgctggacgaatctgcgtcacggctcgcatcgtgccgagtcgtcatgttcgcacgtggtttccgcttctgctcattagcattagctccgcccccgtggttgccctccactcgatcaggacactcagccctcaagtgctcggtgctcccacaaatgaagcactacttgggtcttttcttctttgagtccttaaatttgccacccggttgttggtcctcaccatttccagttttcaccttactgccagccccgctagtcgcaccaatcttctggttaccgcgttgtccagtcccgctcttggcctggtatgccttctgacgagagtccgcaacacgaatcagctcgcgagtccgctctggcgtgatgaagttatctgcgctgttgtagcgcactccactcttcagactctcaaattcgtactggtgcggcaagctgttcagcatcagctcaaccatggcgacatcatcaaactggtagttcaacgaaagcaactccgtccgcaaattaaacatcttgcttaaatgcttgttaacatctccacccggtgacagcttaatcatctccagctcatgccggatgctctctgcgcgatgagccatggtcgtcttgtttgcccggctctcgtagatcacgcaaagcgccttccacatgtccgtcccggtggtcttgtcgcgcacttggtgaaagatgtccgctggtagcgacatcccgatgatctgcatgatcgtcaactgcttgtcatcgaagtcgtcctctgcctccgccgaggtcagcgacgatctcgtgatactgccctccacaatctccacgagcttcttcttcctgaagacaatcatcatcgcccatttgtactgctgccagtcttttccgttccagttctttggaactccttcgctagtgtacttcagcggttccgccatcttggattacccgcgtgcagccggaagtccgtaggtgcttgggctcagtacccttttggatggtgcacttgttggtccgtacggcctggagccaccactagtaggaaaaaggaaaaagattgaatggctgggcctcccagctcttaccactactctcgggcttgagcccgtttctcatgcaacgacccgcagctctcagctctgctaattttctcaggtacctagtctcagctttcgcccgggtctcaactctgaccttcaacttggtcttcaatgtgcattccaacaacatggcgcgaatgggcagagtgatctcctgtatcaagtatccttcatagcaatggacgcgaccgcgcatacacacgacgcggatgccgcccattttaccgaataccagctctcctgcgtgcccctctacggtggagcgaggaaattgagggatgtccacgtacttcatgttggcgaggcacttgctgaggccgccgagaccggaaccacatacgacaccgatgagcgggcgagtggagacacgctgctggaggtagtcgttgatcacgtcgatgcgctccttgggagcggtgtctgggtgaaccgaggaggctggcggggttttcgtgtcgttcatcatggtggtgctggcaatcgttggcggtaacgcaagagttgaagactgagcattgttcacacgaaaaacaagtgattgactggcatgatttgtgaccgaaaagggtgagccaatttgcgatcaaagcatttaagtaccagatttcaaaaccacttcaacctggactcaaaagtgcaactacgccgtttatttgcacccagcccgcagctagcaaacctataacttagcacaagtcctcgctcacgagtggtgttgcttccccacggctgcgatcaggtcccgcacgaacgtctcgatgtcgtgctgcgtggcctggaccgtttccagcacctcgttgtgcgacgccggctcgcgctcttcgcctgggaacagcgccttgttggtaatcacggacatgccgatgaccttcagcccgcagtgggcggctacgatcacctcgggtacggtgctcatgccaacggtgtcaccgcccaccagtctcaggaagcggcactccgtcggcgtctcgaacgtcggcccggagacgaagcagtacacgcccttccgaaccttatgcgagagcccgagtttctcggccacgctcagcgccagatcttggagcttcttgtcgtagcaattcgagagcggcgtgaagcgaggcccgaagcgggagtcgttcggcccgataagcgggtgctggcccgacagccccgggatgttcaggtggtcgttcatgatcatcatgtcgcccacattgaagtccgagttcaggccgcccgcggcgttcgtcaccagcaagtacttgatgccgaggaggtacatgacgcgaatggggagggctgtctcgcgcatggcgtagccctcgtagcagtggaagcggccgcgcatacacacgacgcggatgccgtccaagtcgccgaacacgagctcgcccgcgtggccctcgacagtggagcgcgggaactgcgggatgtcctcgtacttgatgacttcctggttggagaggcacttgctgaggccgccgaggccggatccgcacacgacaccgattagcgggcgagtggagacgcgctcctggaggtagtcgttgatgacgtcgatccgctccttgggaacggcctcgtccgagatctggcccgtggagaggcggcgcacgtggtgcgtggggttctcgctgctagcagcgagcgtggcgacggagctgacgttggggttggcgtgcgggctcatgccgtctacgctgtggctatggtgctggcgggtcacgtgcgaaggcagcggcagcgacagcgacaccgggacggactcgggcgcggcaggcttgaggtcgttcatcatggcggctggaagaaggaaggcgactggcgtggctccgaggcggcgggttcaagagtgagccgccaacagccgccggaaacggcaagctgcgcgtcatcggctgtaaaacggaacgcgcatgcattcaacgcgaaatccatctggtcgctactactaccgctcgtcctcttgttaaatgacctcacttacgacacttacgctcgcggatgttggcaggaatattgagagcagtgcacaacaacgagggtgttgccgcggtggcaacgcatctgaggagatctgcatcctcgattactcgcgcacagggggattgccggccttgccggtgccgccgttgtagcccgccatgtacgcgttggcctcggcgtgcgtgtcgaagcgctggtgctggttgtgccacaacttgtgggagtagccgttggcctgcgccttggcggaatcccagggcgtgtacacgccgggctggcggccgcgtagtactcccggcggggcaacttgccccgggcaagccgcttgggtgtcttactggcgagtcccgtagttgacgccgctggcatcgagcatgtaagcatgcattaaggtgcttgcttgctgcctgaagccgaggggcaagcctgcatcgcgcagcgtcggcttcaactacgacagttttgaaacgcctatctggaatctggaatcacacagatctttgtatctggctactcactattttgggtaactcgtattagtgacatttctactcgactttcgagcggggattcacggacgaagaagaagagctgcgcgcgtgccgcactgccggatagaggtcgagacgcacgccgccgccacgatgatgaacatcttctcgcgcaagaacaagctggaggacgagctgttcaacatgaagttcacggccaagacgctgctgcgcaacgccaagaagtgcgagaagaaccaggtggcgcagaaggccaagctcaagaaggccatcgagcagggcaacatggagggcgccaagatctacgcgcagaacgtgatccgcgagaagaaccaggcgctgagctacctgcagctggcctcgcgcatggacgccgtggcggcgcgcgtgcagacggccatcagcatggggcagctcaaggccaacatgagcggcgtggtcaagggcatggacacggtcatggagtccatgaacgtggagaagatctcgcagaccatggaccagttcgagaagcacttcgaggacatggacgtgcgctccgcctacatggagggcgccatgagcagcggcacgtcgctctcgacgcccgccgaccaggtggacgacctcattcagatggtcgcggacgagaacggcctcaaaatcgccggccagttggactcggccgggctcgtgggcacggagctgcccacgacggaggccgcacgagagaagaagtcgcaggacgacctgaccatgcggctcgcggcgctgaggaagtgagcgtcagaacacacgatacacttttcacttctcttgccgtcttcaactaacggagagaacgcctcgaagctccgtggtttgcaggcaggcgccttacctactattgcatgtatgtactacgttttgaagccacgacaaagctgtacacgttccttggtttcggttgtattgatattgtatgctagcatcggtgcctaccgcgctcagcgctcaatgacgatggcaaccacgctgagccccagcacggtgaacagcacggccaagatcttgagcgtgaagatccgaaagtccagctgctccacctcgtcgccgccgtccttctccacgtcgcctacgccgtggtcatagtgcagcgggatgaagtccacgcgacggaagccctgcgtgttgcgcaggtgctcgttctccagccggaagaagctccagaatgtccggcggaacagctccaggaccatcgtaaagggctgcaggtagagcggcagccagcgagctgctccacgcggcggaatgagtgtcagagtccacgcgaatcgcaggaacaagtcgccaatgatggcggcatagtagacccacttgtgcgagaacatttgcgagtcgcccaggaacttgtattgaggccggccaagcccccagtccatcgtaacatcccacacccacgtgtacaacgaactcgcggtgaacaggaacagccacgcgaccacgaacatgcgcatgtgcatggcgttctcctcgctgtcatcgctgtgaagcgggtggaacagtccgaagagaacgaccacctgcgtcagagcgtacttggcagcgttcggcaggtgtggccaccacgtcttcgtgtcgtacacgcggcgcaggttctgcaggaagcgccaccatagcgggagcgcgcacaccagcggcaccaccacgttcacatagtacacgttgttggcacaggtcggctcatccgggtcgatatccgtgggcaacaaatgcgagtccgggacgtcaccacccgacggaacgatatccttgcgcagaaactccttcgtggcgaagaagcacacggaccaggtgacgtcctgcgtcaccttcaccgtgctggtgaggtagtcgcccacgaaagtgtgaaagaacgacacttgatacagcggcgaccaaacaacctcccacaccgttcgcagcatgccaagctgctgcccccatgggcggatcgcgtagaagtagaaggtgtacaggaacagcgccagcgggtagtagccgcggtggagcagctcctccgggaagtagccgttcacgaccttgtagtagagaagcacgttcgccagaaacacgatggtcatgttggtggcgtccccgaagacctgcggatacgactgggcacggcgcgggtccagctcgaagatgtacctgtagttgatccgagctgcgcgccaaacgtagagcgacacgcccaccagccagtgcagaagcagcaggcagccaatgccacggtaaaccgggtaggcacgagtgcgcaccaggtcaatgagatggttctcgcggccgctgtggaaggtagggaccaccagcgagtcccaacacacccagatcagcaggatgagacacgacccagccttgatgccgaggtagatgtggccccagttgacgaagtcctccttcttggtcatgagcgtcgccactgccaccgtcttgttgccatcgcagaaccagtcggcaaatgatcgctcgacctggttcaacaggtcgaaagacttttgcgccttcgcaaactcgaacgtctgcagtttggctttctgctgctcgcgctgttccgccgggaagctggcgatcttctcgtagcgcttgagaatcttgacgaagcccgtgtagttcagcagcgcgaagttatgcagcaggttgagcagtcgatgcagctcgaccagcgagttcttgagcgactcctgcgccgtcgcgggcgcgtcctctcggtgctgcgcctgcaaatgctgtagctgctcggcgagctgcgcggcgtggcgcgcgtaggcgtgctccaccttgctgtactcgtgctcgagcgcctcctcgaaggcgacgggggacgcgagcagcgtctgcagctggtcagactcggaggacgtcggcggcgtgcctgccagtcgcaggaacgggagcttgctgctgatcttgtgggccagctgcgcgctgctgcccgtggccatggggcgccacttgtggtcgctcagcgcgtcctcgacgtcagtcggcgcgcgcacctcgagcgccgtgctggcagctgcagcgccggccagcgcctcgtcgatctgccgctgccgctccagcagccgcttgagcccgtcgtagtcgaggtagtcgccgcgccactcggccacggcgttgtcgcgcagccgcagcccgaagtgcaccatggtcagaggatccgctactggcgtggaccggcctagagcctcttacgttgcctgcagcctggccagcgctcgcacccgatctgattagcctgtagctggcgccgctgaagttgacgtggtcctgctgaggccaatccggtagtcgcacgggagcgccgtgtccgatgatttttagccagctgctggcccgcttttagatgttttttgggctgcgagagccacttggttccacaccggattaagccattttagcggcggtaagacgcattttagcggcggcataacgcctaactgccggtcactcggatcgcaagaaaaaaaaccaaccagcaagctagaagaaattgagtacatgaagaggaggcattaattagagtttaatgcgcgggtcaagatgagaaagccccgcacggcagcgcgggacccccgtctagcgctcgcacgcgcttaaaacttgacctccttgaggccccacttgatgtagcagaaggtgggggcgacggcgccctccgggtagtaggcgtaggcgaggccggcctccgagtcgcacgacttgaacatgtagaactgcagctccttgaacatggacacgaggaacttgacgatctcctgggcgtcgctcttgaactgggcgaggtcctcgtcgctggcgttcgacgtcttgaggtacttcatggtcttgcggaagtacgacttgaggtacgtcttgagctcggccttggtgtcgaagcccgtctcgatgtagccgaagccgaccgagtcgtcgatcacgctgttgaccgtctcgaccgagtcgtcgagctgctcctcctcgccgccgaaggcgtcaccgcagccgatgtcgacgttgtcggcgcccttggcaaccgtcttggactcgacctggaacatgcccgagacgacgttgccctcgaggtccttgcacggaccgaccttgttcgagtccgacatcacctcgtcctccgtgaacacatcctgccacaccaacatcttgatcgactgcttgtttgtctcgagaccgaaaagctactgcccctctcggctcgcattggtgagcggccgcgaacaagagccaccagttccgaggtaggaaagaggtctctctttctattcggacggaataatagaggctgctgagccaatcgcagaaaatagtcaaagagctacaccgcgcgtctgtactccgcaaggacaagggaactggatttctgccaatcggagaccgtagcagccgccgtggtacagatgcgaacctcccgccacgcggacctgagcaacaacagcgcaaataggcagcatgaatctatgcatgtcgaaatggataggaaggcgtgaacctgttggtctcgcgtctgcgggctgtaggtacatttaaaacttgccgtcctccatcgttaggtacgcagtcgatgtacccataagtcggtacattggtgtgcgccacgccactcgttcgtcaacagcgggtccgctgtccgccgcggcacttccgattttgcttactagccgcgacgtgacgagagtgacggcgtgtccggggggaaccttctaaacgaggaaggcgtgaagtatcacagagagcgggtgaaacacttggttaaactatacggcactctaatcgaacgaccacggtaccagcaccccggggtcaaggactcatgggagggcacggcaagccgccggacgacggcagggtagcgcgtgaagaagaggataacgaggtgatcgacatgacttcgccaacacccactgacacgtcccaggcaccggggcccgatgtggagatggacgaggttgctccagcaacagaccaagaagccagggccgcagaggaggccaacgctgtccacgaggaggaaatggccgagaagctcacgttagcagagatgtacacgtatctacgcagtgagcttaccggactcgatctcaccagggtcaaagacgtagtcagcgcagtcgagtatgccgaagcgatgttcgcagaggtgttcaacgcacgacctaaggaaccgctccctgctgaccgcaatcactacccggaactcaccgatgaagaaggagagcgaatgcttcagttcctgcaggctcatctcagcagtgggcgatcgaacgagcgccaatggcgggcagccatgcacgatctagctcggtcgatctacaaagcgcatacacgtccacttacgaagacaattgaccaccgtatcgctgaactcaagtcaaggcaggaccaatgagcgacccatggtcccaaaagctactctcgaaaaatgaggctacggataatgatgtcgaatgacgggatcttccacgtcggcgtttcgatttctgcggaaaatctattctccgcaggaaatagatgaacttcgggatttgtgtgaagccccattcggatttcctgcactactgcgcaagccaacggagccagaacagaaagtgatccgaggtctcctcgaaggatctattctctgtgaacatctgccggagtttctgaaacgcatctgcaataatgcgtccctacgagtcatccaaaatacgatcaaggcccaagtggagggagacctggtccttcttctccaacccgactttgcagtatatcccgattttcagacccgtgaacggctgataggcatgatcctattgggggtgggaagaggaggctatgacaggacgcaggtggtcgctatgctacgagaaaccaagcaggtctgctacgatgaaggacgacacgctgtccatctcatcttctggacgagggaactcgccactaagtggagcgccgtttttcactccctcccctttcggagtcgacgcatccctttgcagaacgaacatcccgcggtgctcactgataacgtggacttgaagaccagagcggctttggtatgggcccgccaagttggagcggatggcatccgcgacaagcagccgcgggagtgctatcacgttcgattactcaatgtgtcccgctttctggacgaatcagcactcgatgccttcatccagggacagttccatgggtcctacacgacgtggcaagaaccgtcgtcaaaggcccgtaagctacagacggatgcatgggacgtgtacttcaagagcacacattgccccgaatttctcaacggaatgcggttcatcggctgggctggccacaaaatcctagtgcaacatgcaagccgttctagggcaccgccttgtttcaaatgtggggcctctggccacacccgaaaccagtgtaacgtgcccgacgattcctggaagtagcactactgtgtaacggtgaccacggcagcgattgctcaacttccccaccaagcgagtacgataactagcatcgcggagctagaaaagtactggatcgaagaaaaggaggcatcccccccacccccagtagcagctaaagccccgacgcccactgttcgactgctcactaggatccctgagaagcctgcatcgccgagtccaccatcggcacaacgcacgccgcctaagccgaccggacaatgggtcactgctggctccccgcgcgctgctcagcacctccaggctctggttgagcgcgcgtattcgaatgtaaggaaggtcgaagcagcgaacgccccagaagcaccaaggaagccgtctgcagagaccgtcggacgttctatcagtgaggaaatacaagggaggcagcgccaccgaacggctgcaatggagaagcaccagcgtctcattgagtcgcaaattgctgcgaagcacattgtggacgaccagggcgacgtaggcaacgccacggcgctactggcggagcagcccaagcaggccttgaactccggtgaacgggtgttccagcactgtaacttggagcgggtagccacaccgaaaacaggcaattgccagtactatgcggtggccatggctctcctcaaccgagacttcgccgacaaaagcagcgtacctgcgctggaaaatctgacattgacgctcaagaaaggaatgtggtcggcggtaagccactacttcgagcaagaatttcctcacgatattcgtgaagcgatactttgctcgttggacgaaggcctagccaacggcaaagagcgcctaacggaggcgcaatcagcgcaaggtctgaaggactacttgcacgcactatgctgcacaacattcaagcttgcagcatacatcgactatcgttactggggcacggaggtgacgctgcggctgttggcaaaaattcttcaacgaaaaatctttgtggtcgttgcgccttcgggattggtcgacgccaactatcaaatcttccagccagccgaagcagcaaaatcgggcgagactctcatctgtgaaggaacgcaactacgaagggaagaaaccagagggatggatccagcggcttcaagcggcgcgtcaagcaacgtacgcagagggcgcagctccaattgttctgctgtttacagcacggcactacatgcgactttgcttcaatcagccaaccgctccaatgactgccgcaggatcggtaagtgtaaaggaagttgtggacctgacgctgtctgctggtgcggacaattcggctaacgacgtgacgatgactgaaatgggagcaggtaatagtgagaaggacggacatcacctgactgacgctgaacgccaggaggtcgacgcgatcgaggaacatgggggtagccagaaatccgagttacacgctttcccagcggcgggaatccatggactctcccttggtaaggtgaaggagctgcatgacttagactgggatgactcggcagcggtaacaacatggacggaaacctatgacatcactatacagcaactgccgtcgtgacaggaacgcatacggcaaggcgaagtcagtatggatgtaaccccgtcagacccaagccccagcaataccagcggatcggtctggagtcaagactcgatgtccacacaggcggatgctgaccctcacgaaggagacactggaacgactcgcaccggtgtcggtcgttttcacggattagactcccaacttggaagcaactggctgcgaaaaaaccacctacaagcggggtggaatcggctgcaaactcgatgggcaaaggaatcaacgtcaccattcccgacagttcctgcagataccacaacgtggataaacacagtctccgaggccccacgaagtctactgcggatgcttcagagcttcgaatcgccagaatatatcctgagcacaatgacggatgcggtgttagatacgtggaccgaacagagtcgactagaatgtctactacactgtctcgaaagttgggcagcagtacctgaccaagatgtcggtcgcaaagaatggctgcttgaacgttgcgcggacctacgggaaactgctgccggaagtcccgaaaagctggacatctacgcaccggtgatgtggaatacactgaaagcggcgaactttggtaattctcggctacttgagctctgtcaaaagagcgaaacgcaagtactctcgagaatgatcgtagctgccttcatatacgaagtcgagttacgggcgctggcagcaacaccccctggacctctcagctcagttgtagaacacctcgggttgttgttctcgaacgagtaccagcactgcatgccgcgctgtatcgagcgcagacgttcgagtgttgggtcatcattgaaacaacgctggcgctacgcgcgtcgcagcctcgcgatgaggcttcaacttcagttccagacccgtgtgttcattaaccatgctaaaggaaaccggcaacgtgagagcagagcctctagaagctgactacttcagtgagctatacaatgtttcgacattgtttgcatcggcccagccccgcagattaccaggaaaacaagcaagacaaacagtatcaattgcaactcaaaacttgatggggttcgcaaaaaaagcaagacgacactggctcaacggctggaaaaggcatcgtgggcgaacggagcccgacgtcatcatggtacaagacgcgcgactacacacggcagagcaagttcgggcagtcaagcaacgctggaaccggacgtgggcgcgaaaggcaccggagcatccgctgagttactggaccactacagaaacgaaatcatcaggattgggaatactctgcaccccgcacgtgagcagcaaagttcgaccttggcaacgagaaagctggaccaatcgagtgatggctgtggagttcgatggctggctgcttgtcaatatctacgctcctatcgaccaagcggaacgcctggaattttttttcggacctggacccttggctacgccatcatgagtccatcaaactcggaggtgactttaattgtgtgctgaatcctcagcaagaccgggtaacagctcgaaaaccgagcactgcttcttgcgaaagtccgtacctgcaggagatgctgcaagggctcgaactaactgacgcagtctcgctaaagtaccagcttgacgaagaagatgtggatcatgacccgcttcaccactatagcttttggagaaaggatggggctagccgcctagaccgcttctacgtcaaaggacagccctatacggcagtgcagtgggtggaagcactacccccggcccacaattcggaccatcatgaagttcggttggaactttcactgggagaccttcgacaccaaaggagccatcgcccgatccagtacccgatcgtcagcggcagaccagagcgtgtccgagaagcacttggacagggacttcgcaagttactggatgcattcgacaacggaggtaacccgttaggtcaatgggacaagctggtggcagatatccagaatcttattcgagatacaagtcgacaggaccgaaagcagacacaacgttacttcgaaaacctgcgagcagcaacacgaaaaccgacggcatcgcgagcagagcatcaaaaagacctcgatgcggcagcacgtctccgcgctgctcggtctttcggtgatagcatacagcaatcgccggaaacagcgcgaaaattgtttaagcgtaactcggaatggcagcgagaccagcacatatccagaattgatccctctccaggtcacttctacccggatgccatgccgagtgaagagcgaatggcttcggagtggaatcacgtgtttggggcatcccacgcttcagttgactccagttccctcgaagaagagttcacccgctttgtgcagattccggtggaaaagcggctccggcgagacgaagtggcagcacttttggctcccatcacggaagctgaaacgatagccgcgatacagcaactaccaaggcataaagcaggggggactactggtctaaaccacgacttcttcaaagactttgccgacgagctctcaccgagtatgacgagactctacaatgccatcttcaaggggtcaggggtgcccgattcgttcctgcgtgctacgatcatcccactccgaaagaaaggggactcagctgatgcaatggactaccgaccaattgcacagctaaacacagcgtacaaggttctgggacgcatcttggctgaacgacttcacgctatcttacccagaatcatcagctcggctcagcaaggctttgtgcggggacgcaacattgacaaaacagtcacactcctacgggcgattctggcgaccagctttgacgacccgacgaaaccgtgggaagaatcaccggcagtgttatgcctcgatctccgcaaggcgtacgacacattgtcacgagttgtcctccgtagctacgggtttcctcctgaattcttggacgtaatcctgacgctacacgaaggaactaccgcgcagttcctagtgaacggcaatatatccaaaccatggcctgtgagctccggaatccgtcagggctgcccgctggccctgacggattccggagtactgtgtacatggcatctctaaaggaactcgacattgtgaaacccattctcgagaagttcggagagctgtccggactacatgtccagcctcaaaaaagtgtattgattggtctcaacacagcgaaggcgccgtcgcgatggcaagggttccctgtacaagaaccaaccgccacgtctaggcaacggggtaatgggtcggcaaccacgactcgacggagctcaattgggcaatccgacttgaaaacattcaacgccgacttcgaatagcaactaccatgggcaattccgtcgtccagagggtgacattgttcaatgcaatagcgctcccagcgatcctgtacactggacggcagtatgtcccctccaaagccacgctccaagaattggcacggctgcaaaaaggcttcgtttggtcagccaccacacgaactgagccagtcaagcacaagcttaaccctgctctagtctacactccgcagcaacacggcgggcttggacttcaagacattgcaagtgcgtttgcagtatcaaggagtaacctcgctgacaaatggctccattctccggacgacgtctacacagcagcctggcacgcagccgtgcaccccaacaagaacgcacaaaattttgttgtgcgttcaggccaacatcgccagccatgatttcggctgcgctccgtgaacacttcgggcaaccgcagatctcggcccaaggcctgggaaaattggaactatgggaagcgcattctcgaaacttatcaccatcccctgacgacgtgaaaactattgcaggaccccaatccgcgggtcccgaggtaagcaactgttgctggatcggaccagagtcaaaagtcattctcgtgacgacatccgcggcgccacggcaagataatccaccggtggacgtggacttcttacttaacgcaccatgggacaacaacgcatgtatcctcggcgcaaaaggcaggccgctacgggcccgcgactacccgaccatccagattggacgtacgcgagacattatcatccagctgccaccggttaccagacctagaaaggaagtcctcatccaacctgcgcgaacggcaaccaccaagtccaagcacgtgctcgactggtgtctgagcatcgctcacagcatcccgtggaactactggaccgtccaggatagacagccacggctactcgaactccctgtgctgacaacgccactggtatggaatatcacccccggaacaaacacgatcacggccacgtacgcgaacaacggtctcactcgccaagcgctgacacttacaaggaaccaggacggatggacgtggcacttaacgtctgcagctcctgcgcttgaaagcacaggcgatctcgccgagctcagagcttgggaacgcatgagagcgctcgtcgtaaagtctgcgccaggaaccaccgtctacccgtaggcagtaccaccagctacacctggcagagcggctgcgacgacggtccgcaaacaacgctcacggttaattcgacaaactctgcagcacgcgcttcaaccaatgctggacaaaatgcagcgaagagaagaacgatcgtcatggggaaaagcagcactgacacagagcccagctcagttgtgggacaccaatggcctctttacggattaccaaaactggattacgtaccgaatcactctcggtgagctgaacctctaccgagaaggatggcccgcccaccgggcctgccccgaagcaacatgctcgactcaccgcgaaacgattgatcatatcatctgggagtgcgaaaaagcccagctttcatggcggcactgggtatccaagtggctcggccgcgagtgttcccagaacgacatcgccagtctccagccggccatagcccagcgacaaccaccagcagtgatccccgagctactcgcccacgcccagcagtgcacagcgacatggacaccccaccacaacaaagcgatgacaacgttatggcggatatggacgacagtgacccctgtgctgctgtggcgcttgcgtaactacgctgtcttcaacaacgaacactcatctccacaagaaacgcgagcagccgtgtggtctgctggtatttaccaagtccaggcgataacagcagccttggaagaagaagagcgcgacccgcgttcaggcatggtgcctggagacatgcctcggcatcatgacgacgagtgacacctccacatggacgccacctctcgatcactggtgtctttattgtgcgattagctcgcagcagcagacaccgccaggaggcggatggatcctgtatcaccaacgcgccaacgggacgtggcacacccgcaaagctggcagcatggggttcccagctacagactccagccaggacatggccaaccaagttctcacccaaggtatcgcggagctcctccaagcagcaacaccagaaacagtctacgttcacatcgaaggccacgcgaacatactccgtcaccaaaacagaccaacccaggcggcagacaccgacgagctcagccaacttctcgggcagctcttcagtgtgcagtggggcaatccttcactgcaattgctacgccccgcaagtatcctggcgaagaacacaacgaacacgacgtatgacttcgactgcatgacagcagaggcggcagcaacaccgttgcatgcgtacctcttgcggtccgcccggaagcatcagcccagccccacgaactcatccagacagccgaccggatctatccagtcacagcttcttgcatatcaggcaactgtaggacaaaaataagcctcaaaatagcctgcctttacccccccccccccccccccccccgctgtccgccgcggtcctcttcttccggctgggcagcgcagcgcagccatcggctctgcggcccattactgcgcgccgaccaagagtcaagtgagtgccatttgttgccgacactagaccagtcgcccccatcgatggcgtgcctgctcgccgctctcagtggcgagggtggacgcccaatcacacggcgcctcgccgcgctgtcaacttctacactagggcgctccgttgacacgccaaggcggcagcgcaggattatggcgtaaggcaggtccgcccttcatggcgcttctaccggccgccccgttctctccgcatgccagatggcaggctttccctttagggcccgttcactagcgaaatgtgaatgctgacctgccgaatccgctacaaccgacagctgtgcgatagcgaatcaccacgcatctccacctattttcatccaataaaaagcattagatagtcctgtgcgctatgacatctccgcagccgatacttgccttctcggcggtagtagacgccgaatagcagacaacgagcgagggccgggccaccactttcctcgcccgcccgcgcgcgtagcagccttccgccttcgtctctccgcccactcgctgctggccgcagccgaacgccgccatgtccaaggcgcccaaggccaagaaggccgcgctccactaccagccgtaccaggcgctcggcgtacgttgcagttcgctctctggcctggggattaatctgatgatgcatgggcctctcacccactcgtgtgtatattctgccacgtgtgctagcaggctggagatgtcgatgaggcgtccatggacctcaacatgtcggacctgccgctgcacctcgaccccgtgctctcgtacgtctagctctcctctctgacaaccatcctcggggtcctctatctaaccgaagggtactgctgactatgtccagaggcctgtcgtccagcatgagccgcaacctgtgggacgactggaacgagaacgacgccaacttcggcatgaagttcgacatgttcgcggatgaggtcagcacggccagcaccgccagctccacggccagtcccaacccgggcatgcacgtgccgcacggggaagtggccaatagcggcttcggccacatgtcgccctcgccctacgagcagcagcagaacgcgtcgcccaacgcgatgcacgcaggagtaggagggacccccaccctcgaagaacagtacaagccgcgcgcgaacgtccagcggtcgctcagcgaggacatcgtcaacatgctggacgatagcaacgagacctcgtaccccaagcagatggagacagatccgcagcgccgcgacgtggccatgcagcagaacatgatgtacaaccctgcggcggggcagagtttccagcagcagcagcagcagcagcagcagcaggagatgcactcgaaccacatgcaccagttccagcagcaacaaatgcaactgcagattcagcagcaacagcagcagctacagcagcaataccagcaagccccgcagcagcagcaaccgtttcagcaacctactggccataatacttctagctggatgagcagcttcggtggtggaattcagagcgccgcgaccacgaccacgacagcccccgccaaacccggtgtcaatccgactactcaccgtcgtccgtcaaacccatcggcattggagattgccgttaccgaaggaacagcttcattggttgccaagtgccccgcatcacatgctccagctacgccagcggtgtccaccccgcttgcgccttcttctactccgcagcaaactactgcttcaaaggggaaagctgcaggggctcaagccggtgtatcttccgctgctaccaagtccaacagcacgccgggtgcagactcgagcaataccaatggtgcaagtatgaacgatccggggcagcaagccaacgcgtttggtgggatgatgatgaatccgttcatgatgtactcgattatgggtccgcaagggatgaacatgatggggatgccgatggcgatgcctatgggaatgaacatgaacggaatgactggagtgaacgatgtgaatggctctagtggcacgaatgaggcaggcagtggcaacaacatgaacggaatgaacggcatgaacgcgatggctggtatgaatgggatgcagcttccgatgcaactccagttgcagctgcagttgcagatgcaaatgcaaatggctcaaatggcgcagatgaacggaatgggagggataaatgggatgcagatgcccatgggacttcctggcatgtccatgggtatgaacatgccaatgcccctgaacatgaatatgcagcagcagcagcaggttaaccctcagagcggactagcaggcgacgttgaaatgacccccgcagcggcggcgacagctttctccatggcgatgcctaccacaggtggcgcaatgctgaagcctgccaggccactgcaacccaagggtgcaccgcgtacaggccccgcgtttgtgaatatcgcacgaaagcccgaggagcctgaagtgagcagcattctgaagtcgctcatggacgaggaggccaagaagaaggagaagaaactggagcgcaatcgtgactcggcacgtgaaagccgcaggaagcagcagacgtacgtggaaacacttgagaacggtatcaagcgtctgcagatcaaccgcgacctcgtccgctcctaccgatggggcgtcagcgggccaggctttggtcctcttccctgcccgaactcgccgcagatgtttgactggaagaatcgtcttgaagtcgtcactggtcgtactgaggcgttttcgagtatccagaaccccgctaacttccagtccctgatgcggctcaaccgacagcgtcgcacgctggcaatgcagcagcttgaacgcgaacgcgctgtgtggaagtgcttcgtcttcgtgggtcggcaactcgccgctatgcgcacgcgggtgctgcaggtgcagatgctgcgtacgttctcggagaacccgttggcgatggagctggatgcagtgctgaacctgacggccgaccagaagctgcagctgcagtgccacgcccagcaaacgttcaacgaagaggtggtggagctgacgaagctgttcaaggtcttctttgcgttgcgcaacgaggcccttcgactgaatatcatgtcaccttcgctggagcgtcacttccgtgatgcctgctcattcgaccagctgcaaaagctgctgcagtggacggagactcaccgcaccgtcatcgagacggatctctgcttagacgaagtgtaggcgcgagtagttgtgaaattatcatctttcagcacacaagtgaagcacgtatggatatggacatggcttcgagtacagcgtaacgtggacgattttgtcaatcgaatccgatgtacgtacactgtcgcaatgggtggcaacttctgttgtttcatgcagcccttctaacccagatcaatagcagtcgaggtttagacggaccgcttatacatgtactttgttttactctttctccgtgagctcgcgctcgatctgatgcagttcttccagcagctcgtcggccgttggtcggccctctggctggaaagcctggcacctgaacatcagaagccgcacaggtgtcggtgcctctgcatctccagacgcactgcccttgtgattattcagcatcgggacttcggtgtcgtccatgaccgagtgctcggctgaggtgcattcgtacgtggcaagttgcgcgagcagtacgccgaacgagtagatgtcagcctttggagtgtactggcgtccgtcgaggacttccggcgccgtccagacggtcatgtccatgtgaacctcctctccagcgttctgcgagctcgtgttgctgcgcccagagaatctcgctgaagatcccgtcgtggaagggagagacccaacgtcattccggttgtgagacgacgaccaacgccgcagcgcactgcagcacgttagatcaccgagcttcacgttccagtcgctgtccaggaagaccttccgagagctgaggttgccgtggaacagcggctgcgagaacgagtgcaagtactgaacagcctgcgcgacctcgatcgcgatggagagcttgctcttgtaggcgctggaggagctcctccagctccatcgattaccgccgtcagccaacatggttgagtcttcatcctcggactgtagggcgtctacgtcgtagtcgtcgtcactctcgcgcttgtcgagagaattgtccccgcttggccgctcggctttcttcgcttgtagagctcgtttgtgagtctggatgaagctgttgaggtcgcctttgcccatgtattccatcaccaacgcaactccttccgagtcgctgtgctcagcgaagcgagtcattttgacgaacccatagaaagcgacgagttgcgggtgcgatagcgtggcgctcagacggatctcctcgacaaacccccacaactcggccaacaacgtgttgtcacgcttgtcaccattgcgtccaccgcgactagcgatgctaagtgtcttcagcacgactgtcttgcctcggtacgcagctttgaagtagacgaacgcagagaagctctccccagaatcggggtctcctgcttcggtctgctctagtgagggagctgcgagcagctctcggtgcttgactagcgatccatcaatttcagagcgcgggagctcttgttggagacggaggagcgggtcgttcggcttgttcctcttcgctagtgcgtcgttttcagcatccatggccagttcgggctcaggttgagaagagttctcgtctgtgctcggtggatcggagcacagcaagtggcggacctcgtcgtctggctccatactcgcgctctcgtgccagaagttgttggatcggccactcgctgtcttggccatggctggctggctgcctttagctttaccaccaccaccgcggactttgcgccgcagacacatgcaaaaagtgttgacgaacatcaagaccgtgaacgccgagagcaaagctgctgccccaataaggaaccacgagcgccgctggtgcagagtttctttcagagcgattcgctcctcctcttgagcagatgacgcatccgttccccacatagaccccgacatggacccgcttgaggctgctatgaccacactctcgtacttgtcggcaaactcgctgtctgatagcacgcacagcatcgtatcttgaacgtatcgcgggtttgcgttggagtcggagcagctcagcgtggacgtggtggaaacatcccacagcgttagcttctcgaacctgtccgcgtcactctgccgcacttctaactcctctagcacgctgactggttctgctgcagggtttgcggcggtcgtttgcagtgcgcgcgcttcctccggagtaactactgatgcggttgaggccgttgttcctgccgccgccgccgaatttgccgtggcaatcagagtaagctccgagagggaatccgggaagatgacgcccctgataattgtgatggggttgttggagaagttgagcgtcgtcaccgagctcgggaatgaaaagttttccagcgtagcaacgctggagccgacgacgtccctgtacacgatcgatcagcaccaacgtcgtgagtattcgagcaaggaatttactgaaggacagagcggcatacagttgcaataggctggatgggaacgatacgttggatagtgatccaattgggttgcccgacaaattgctgctcacacccaaaacgtaaacggtgaggttatcgaacagacacaccaacctcttaggaccacgcatgcatcttacaggtactggagagtggaagggagatcagctccgtcaatatcgcccagggcgttattagcgagatccctggcaaaccacgtacgcaccacacattctatcagccactgcgctgacaaagtccagagcagcgcatcacgtacagaagtgtaagagcttcagggaactcgaattcgtctatcgtagggatgctgttattcgccatatatctgcagcaacacaagcgacgatcatcagtttccagtcccacggaatccaatcaccaactcccccaccactcacagctccgagatgttgttgactgtcgtgaagcttcgaagctggttattgtccagtcttctgccctccaaagaaagcacacagacaaacgccaaagtcagctactacgtcacgtcgtcctcccacacacgtacacaatgtccaccgctgggagactctcgaccgccacgatgtcgcggtgccggaggtccagcatcttcactcccgcagcgctcgtcgtgaccttcaccacgctggcctcgcacgtcgacgcgtctgtgacctccacgctgctgctggacgtcgaggtcgaggtcttgtaggagttggagctgctgctggggatggcgaccgtcgtgacattcgggcaggaggcggcgctctcctccgcttctcccacgtccactgccaggcacgcacggggccagtccccgaccgccaggagcagcgctggagcccagcgatgcagtggcatgaccgtcggacgtccttgagtggagggcaggtgaatagtcgagccctcgaccatagtgaaagcaagtgtaaaatagttgtctcaattgtagccatctcagcttatggctacatctgcgacttgtgcgcagatacttttattgcaactcagcggatgtggacgtgcagcgtcttcttctgcgcgcggatggctttctgccgactccagccggcgagtagagcctccttctcgacgcgcttccgctccgccagctcgtggcggtcgacgtcgtcctggagcttgagtttggagatgaagtacgccgactcgacctggtccagcgcgcgtcggtctctcttgagcgcgtccttagctgccacctgctcgttcagtctctggttgagcttctgcttctcggcgcgtttcatctcgtcgctcatctcgcgctccagtggcaggattttgatgtctcggtagtcgtcgcggccacttgcggatttctggcgcgacctactccgcttctcctcgatctggttgttcagtaaggcgttgagctctcgtcgggcgacggactgctcggctcgcttctgcaggtcgcggatctgcaccacgcgctgccgagtcgccatcatgtcgttgaactggtcgtccacgcgcttcgcctgctcgatgttggccacctcgcgctggaacgctgcctgcatgacttcttcgtggtccgggcgagctttgaggacttggtgagggacacgcggctcagggatcaagaaccgcggtagtatttgccgcccgttaagaggcaccgactcggggttacagttgttgtcactgggcaccacctcgttcaactcctgtcggtgcttgcgatgatgactcctcgtttccttgtccgtcttcacgctctggccactgccttggtgatggagagcggcaaactcatcgtcacctaaagccttgaggcggtgcttgcgcttcagcttgttcggaacttggagagcgctatcgaccgagagcgagcgctgcatcgtgggcttgtcactatctccgtgggttttgcttgcctctagctgcaacgctttctttcggaaactatctagtgcaccgctcgagcttttcctaaacactgcggagggcgggggtatctccacttggtcactctgcgtaattgaacgaagtaaggtcgagtcgaaggtgaacgagagcgccttcccgtcgagtgcgaagcttccaaccccttgaagcgtcaatctacccgcatagtccccgccctgaagcttcttaccgacgaacgcgaggatggcgtctaatgtccgacgtgtttgatcggatccgagcccggcgtcgctgccgagagcagccatatggacatctgcagtcgcagtgagcggagcaggtgacgaacggtggcgccatacgacgccgtacgttgaagcgaagcgatccgccagcaggaacactggcgcgccggccatattgcacgtcggcgccttgtagaacccgaacttccctagctgctgcagcgacacccccttccgttgactgagctggcgagctacaagtcgtccaaaagcttgccacacgctagtcaccgacgccccaagcagcacctcgaactcatagctggacgaccgaagctgctgcgcgcactctgctagaagatcgcccctactcgccatagtgaatacactctgaacaagcgcttcaagacgacaacgggcggtctaaatatttattcacttatactgatcggcatgacaagaaacaaaagcgcagctattcctgttcggcgtggcgtggggtaatgttagctggagatccgccttcgagactgcaacacaagcgatcgctgctcgcggttgagcgagtaagcgaggatctgcccaccgaaagttgacgctagaagcgtgctgttgtgcactctgcacaagcccgtgaacatccgcttcgcaccgtcagcatgcgcctcggctagtggagagagcgttgcagtgtcccagaccttcaccgttccgtccttagacgctgtcactgggagcatcggtagagctgcaggatccgtctcaataccatcatctgcagtgctaggcaggaaacagcacacggatgcgtcttgttggtggccctggaactccattacctgcttgcccgtgcgtcgatcccatactcgggcctcacagccaacaccgttgaagcccttgctagatgtcagcaagtacgtactgtcctcttcgctgccgctgccgtacgctgcaatactcaacgggaaatacacaaaacccctcagcgtctgggccggcacgcgcagaggcgttcgagggtcccacaccttcacactcagatcttcgctgccttgagcgaccagaggctcgcgcgggagccacgtcgagcacgtcaccacgttctgcggcgtcgtgttcttggccgcgatgtggctcgtggtcaggtcccagaagatggtctgggtgtctcggcccccagagcacagcatctgctcggcgtcgtccacggccacagtggacacgttgagctggtgacctcgcagtaccgtggccgtctcagacgcgggcttgtcggcgatgggtgtgatggccaccgtcgtgtctcgcgagcatgagtagatcatctgcagcttgtccccgatgacgatccggttcacggaccgcgagtgcggcatccagacgttgacggcgtcctcggcgggtgctgctgcgtcgcgccagttgagccgctggatggagccgtcctcccagcccgcgaggcagttgtcccccaggaaggagctgtacgcgacgcagtgcagcgccagctcgctctcttgctcggtcgcggcagcagcctggtcatccgcgccagttggagttgaagcggcgccgtccgcgacaggtggcgtctcctcctccaccttccaagtgttgagcttgttggcgtcgcgcgagttgcaggcccccatgctgacggtccggaggcggtggaggcgcgataatagccgatccgatccgagcgctatggacgatagcaagcgaggtgtcaggcagcgactgcaagttgcatcgtcctcgcgtctttccaacggaccttcgtgcctcgatttcagacgacttttactcaccgtattatagggaccgtatataaccgcactactatgtacgatttacataaataaccccggcttctaatacacaggtgcgaacttaatagattaagtacgcgtaaattacaataaccatacataataaatactttagcaatcgaaggtacgatcaaaaagtattgtactttgtgaggaaattagtaaatagctcttaaaatatacaccaaaacctgtataaaccaaagtacctgtataattagtcgtacaatgatacaaataaggtctattcaaactcttctatctaataacgacgtcttcctcagtgaagccaaagtaactcatttaatttgcatcacagtaccaccactaagactgcggctgacgtgcgtcgacaccactcgaaccaacatgtcggcgacgaaccaagtgacgcgcaccacgatccaggtgcgcgcgcgcctgctctgctgcctgcctgctcgcctgccaatactgacaaactgtatgcgcttgctcgtcgtttgcgcagctgtaccgcgattgcatgcgtctggccaagcacatcggcggcaacgtacgtcacctgcttatctgctctgcttgacccagtgcttgtgattcaactgcttgtgctgacgctgctgtgtgtgtgtgcattgctccacgaccgctttgtgcagagtaagaagggccaggccatcaaggagctcgtgcggcgggagttcgagaagggccgcagcgagacggacccggagaagatcgaggcgctcaaggccaagtacgtagcgctgcattcacgcttgcaggcttcgctgccatgacgctgttgggaaccattttctgactctgttcgtcttgcgttgtgtttctttgcttgcttgctgctgctgtgcagtgccgtccgtggactgagcaactacctgatgctggccaactcgagcaaggaccagcggctgcacaacgcgatgaacaagaagtccccgcccaaggaggacggccccgagcaggcggagtaccgggacctgtaagctagagcggtctgcctcgctgtgtaaaggcctacaaaacacgcagtgcccctgacaaaatctcaatcgttgctgtcgtgtttgagtgagtctcgtgcctcaaacaaatggttgctacgcaccggctcgtcgctatcgggagcagtcgagttgagccagcgagatgggcgacgaccgcatgccgatggcaattctcggtacagcgctaccgttccgaagcttcactattcagcgctgtacgaggtaaagccctacgagataggctaccgataaaacggcccacatgcaagttgtcgtcacagcggcagcacacaagtgcacccacgcaacgctctcgtgcattgatttttcacgggcacgtcactctcgactcgagagagtctcgagcgcctggagccacggggaaatcgtaaaaaaactcatgattgcgggcctctgttatccagtgatctccaagacgagaagatgccatctcgctgcatcaagcccgtccaaggagcagggaagccagcatgttgaagtgcactgtaccagtcgtgtaagttcgcacgctaagtacgctcgaacctaggtcaatccgaatttcagccaatggtttcgctgatggcccgccagccaatggagcgactcaagtgctctgctcgattcaagttgccaccgttccggccgcgccacctccgaccatgagcgaccccgtgcgcgaccagcgcttccagaaagtgcacaatgacccggtaaggtgtacttcaatggtgcaatggccgtcacgcaattggatcgctctctctaacgtaatactctttcatgtagagattcgctcgcaactcgaagcgcaagagcaagctgcagatcgacagacgcttcgccggagcgctcaaggacgagcgattccagagtgtgcagggcaagtacgacaagtacggacggcgcatcgagaagaaggacaacgagctgaagaagttctaccgcctggacgaagacgagggcgacgaagagcaggaggaagaggaggagcaagaggaggagaagaaggccaacgccgagacttcgtccacgaccagctccgacgatgataatgacgacgccgatgctaccgtcgccaagaacagcgagaagctctcgcgcctcgattacctgaaccgcatggcgcgtggtgagcttgagtccggctcggacagctccgactcggactcggaggacagcgacgacgaggaggccgttgctgctgaaaaggaagaggaagaagatatccccatgggcgaggagaccaagcgctttgctgtgctcaactgcgactggacgcgtatccgtgctgtggaccttttcgcgctctgccagtcgttcgctcctcccacgggtgcggtgcagaacgtaactatttatccgtcggactacggtcttcagaagatggtacgcttgtggatgtgttttggtgtgttgcagtgcattttgcgctaactcttagtttccatctgcagaaagaggagcagcagcgcggaccgcagggtctctgggatgatgaggacaaggccaaggaggccaaggatgagaagccggagactgtcgaggaggaggaggccgacgatacgggtgatgaacaggacgatgcggaggaggagaaggcagaaaaggccggcggtgacaacgaggacagtgatgacgacgtggaaggtgaggaggactatgactcggacgacccgctcggcgtgaagaagagcgtgactatcgagggcgagtcggacggcttcgaccgcgaaaagctgcgcaagtacgagctgcagaagctgcgctattactacgcgatcgtgtcgtgcgactcggttaagacggccagcacgatcttcgaccagtgcgaccagctcgagtacgagacatcgtccaacgtcctcgatctccggtacgtgccggacgacacgaccttcgctaacacgcccaaggagtcgtgcgatagcgtccccgaccggtacaagccggcgatcttcgccacgctggcgctgcagcagaccgacgtgaagctcacgtgggaggaggacgacgagcagcgtctggagcttctcactcgccctgccgactggaaggacgcccacgacgatgacttcaaggcctacttggcgtcggatgtgtcggacgcttccgaagctgaggacgacagcgatgacagtgacgcagatgaagacgctgaagacgacgcggaggctgcggctccggtcagcaagaagaatgcgaagaaggaggccaagatcaagaagctgcgcaaccgctaccggtcgatgttgctgggcagcgacgcagaggacgaagacgacgacaacgccccggaaggaggtctgggcgcgagcagcgatgaggacgaggacgctggaggtgacatggagatgtcgttcacgcccggcgcgggcgacgtgctgaaggccaagaagcagcgggagctggaggagaacgagacgccgttcgagcgctacacgcgcgagaagaagcaggagaaaaaccgcaagctgcacgagaagcgcgcgcgccagaagcagctcgagcgcgagcagcgagaggtcctcaagaagaagggccgcggcgccaaggaggccaacctcctgcgtgaggctatcactggtggcggcgacagcagcgacggcggcaacagcgacagcgaccaggacgagcgcaacttcgacatgaagaagatcgccaagcaggagaaggtcaagtctctcaagggcaagcgccgcgccaaggagatgaagaagctggccaagcacaaggcggccggcggactgcaggagggattcgagttcgacgcggccgacccgcgtttcggcgcgctgtacgccaacggctcgcacttccagctggacccgacggaccccaagttcaagaagacggaggccacgcaggccattttcaaggagcggcggcaacggtacgaccaggaagccacgcaagccaagcccgccaagtcggactcggctgctactgctgcctccagcgacaacagcaagcacacgctcaacgccatggtggaaaacctcaagcggaagtcgcagcagcagcagcaggacaagaagaaggccaagaagcagaagaagagcaaggcataaagtcgcgatggccagctactgaagctgtagacagaagggtccaaagtatatagagaacaagttttgcttcacacttccgtttccattagtgttgaagggtctggacgaggagtcacatttcgtagatcgccgtccgaagcagcagcatgcaggtaattatgctgagagtttgggcgtgtggtgatgtacgtgtagtggagcctcactccctgtcggtgtgatggtctcccgagcagcgcgttcagatccaggaggtgctgcccaaggccggactcgtgtactcggagcgtggcaacttgactgaggtactctgcaagcccaagatcatgcccatcaagtcggcgacgctgctgcgcatcgaggagatcgagaagcaggcgcgtgctctcgccaagccagcgactgccaactcaccagactattaccgccctggtacatcgaggaaatgaacgcctttcaaagcagctagacccggcgaagaatcgataactcgtgtggcgactaagctagcaaacacgacttgtttacatttgcctcaacttgtcacctctgtgtgcgagctagcacgtcacgcctcttattcactgaaaactatgcccgggtaatggaggtgctcgtaaggctgcctgtccgtaccaagtgaacaatttaagaccgtgcagcgtcctactgcatgccacccgaaaacatctcgagcagagagctgagtcccgaccgcggcggctggagtccgtagaacttctggccgatcacgcttaaatactgcagcggtcaaaacgcacagcggtgatgcaagtgttagatccgttatctcgtccacagctcggcgcaaccgaggcaacacgtacgctcttgaggctgctatcgcgagcaagcgccggagtgtagcgctcctggagcatctggaagagcgggagtgcatcacgctagcaaacacaagcacaacaataccagacgaacaacgtcattcaaccaggaacgtcaactccaagtcgtgaaatgctgtaacaaaagccatatcatcctccctcacctccagcgtcagcagcaagaagcgcgtgaagttgaatagcggcaggtcgaccgggcgtccagcgctctggcacttggccacgtacgcctcgtacactttgttcgcgtcgcgcaggttctccaagctcagcagcctgcaaaaaacagcatcaaacccccaatcagtacgcacttcacttcccacctccacaacctcctcccaacgccttactgcagcacggcccgagccaggtacaggtcggattcactcgggtatccctgcgtcgaccactggaagagcgcgtcggccagctcctgcgggttctcggagtgcaaaaagtgcttcatggcgtgcgtgaagtcgcccgccgtgcggtaggcgcgcgccagcagcagctgcagctccgggtctccgcgcttgcgggcgccctcggccgccgaccacttgaccgcgttcttgaggaagacggcgaggtcggcgctgaactgcggcttgggctcgaaggcggcggccacgaggcgcacgcgctgcttgtgcgcgtcgtccaccgggtggtggaagtccgcgaagaccgagaccatgaggttggccatctcggtggccgccgtgttctggtcgtgctcgacgagcttgagcgccgcgtccagcgccagcgccgccgccttctcctgctgctcggcgctgggctcgtcccccttgaggaagcgcatgaacagcgtcttgtacatctgcagcgcgccgtagaagtcgcccgccgccagccgcagctccagcttcttgcccacgttctccacgcccgcgttctcggcgctcaggctcgcgggggccgccaccttggcgcccgcagccttccgggccagcgctcggcggttcattattgcgatggcgatggatacgtggtcagtcgagttgttgtggtatttgggtcacgttttgtaagattgtacagtgaatgatgtgaaaagtgcacacatatagagcaatagcttccaaaaaactacaccaagactgaaaagcggaattgtgagtcgaaacacttcaatgtgcaccttggggccaatgcccacgggcgtcaccttgcactgcttgcgctcagtcagctgtaggagagtcacgcgagcgagagtaaacaatccagatcgtggcgagaaacatactgcacaaccagcagcgagtgttgcagcgccagccggagcgccggacaaagctggaaaggcagccgaaggaggcaacgcccgaagaggaactaaataatacaagtagattggggctatttgtcaaaacgtaagtagatcatggggactacatataagtagactgggggacgttgattaaacgtattttaacaatcacccctgctacgcggccctccagaccctaaaggctcgctgtgctcgcttggacagaaccctaacatgcccgctgcggctcgcacgcgtcgcctccgcttgctagaagggcaatgctgggtcctgggtttgcatccgcgtgtttcgcacacgggctgacaaaccgcaggcgtgggctcgcttcgctcgctgtgcgctgatggtctgatctacttataagtagtccccatgatctacttacgttaggacaaatagccccaatctacttgtattatttaattcctcacgcccgaattactgtatgtagtcatatgaattgcagcacagtacatgtattatgcgctaagatgcaagccggtcgactatcgagcggcactgtatcacgaggatggaaggttcaaacttttcgtacgtttatcgccattccagcatgaactcggcgacgtcgctcctgagatcgcttcctaagagcaaaaactccgatgcgcctgagcggtgatgcaccgcaaacgaagcagcttggctgcgttcgcaagcctcgcaacgaagcttgctgtcggtgattctgagttgacgtagcaaagttacccgacataaaagtcctgaaagtcaagcgttgcagctgaagttgaggtattggcagttgggcaggacgaatttgatgatgctaaacgctggcgtggagccgcaaacaactgagcaacatttcggacgagcggctgcattgcatgaagaagcctggagtaacaatgcgtgcacatttgacagtcacacccgcgtcacgcaacgtactcgttgggctagctcactcgattgagtcgggctcgtgcagatgcccgcccaggccgagcctcagctgcaggctcccttgctggtcgtgctttaccgcaggtgactggtctatcgccgcgcgctaaagctggctggccaatgttcctgctgcctcgaccggtcctgctgcaggctggcgggcggtaccttgggcgcggcagcaaataagtcgccggccgtctgcagtctatgccgagagacttgcttgacgggctcgagttgaagtggaagttgcctttttttacggtaaaactggcagaatatctcgcttgttgtgtacggtagcctggtcgcggccggcagctggctgcacactcgatgatgatctgctgcggcttcctgctttctctcgtgtcggcctgcgcatgagctgagtcaatcggcgactccactcgactcgctcatctcacctggctaagctgccgatttatgcgcgaggcggcggcatgtccacaccgagagcacccgctcctgacccacgacatcggaacgcctgggaacccgcgtcacagtccaattggagcgctgcgcaacatgcgctaccgctcggagctcggtagcggcttggccagtaacctcagcgtcagcgagcgcttcacgaacccgttcgcgccgctgacgctgtcgaccgaagccgtcgtggggctcgagacgttgactcgagcgttggtggcgcgcaacttggacgcgtacgagcggcatctgcacgagaacggcagcggccaagtggacaagacccggtggaagttcatgtacgagcagggcggccttcggtcgtacgcggagcgcggcacccacacgtcgttcggactgggggcggcgttcggcgtggcggcgagtcacttcgaccgacgagccccagtgtacaggcagacgtcgacggcgtcggtgccgtcgattctggtgctcggggcgatcgaagggcagctggacgacaccatgtacggcttcatgtgccccacgctggaccagatgcgggtcaagacctcgtacatcaaggacggactcgtgcgcggcagcgtgctggcgactctcgtgtccccgacgatcgaggacccgttcacctcggtcgccgtcaagtggatggagcaaggtcagccggcgcacgctcgcgcggtggtcaagaaccgcgactacgtgtacctggaagccactggcgtcgagttcctgcgcaacggcgagcgcgtggggtaccaggtggtgcactcgatccagttccccgagaccccggagcgtccgtcggctacgcgcggcaacatgtccatctgcgccatctacaggcagaagaacagcgaccaaaccgacgtctacgtgagaggcttcctcaaccccgtgagcggactggagaactcaatcatcacgcgctccgtggctcgaacgctgctctccgtgtcgaggaacgtctactgctgccagatgaagaagatcaagtgggcgatccgacatcgactgcggtccatgtcggacgcctctcaactgccagcagctctcgaccccactaccgacaccccgtgcgtggtctgcggacggaagcgctcaaccgtctccagtctcctcatcgctgccgccagtcgcatcagcgccaccaagaacttccgctggcgacgccggtgcaagttgtgcgagcgctacgtgtgcccagactgccgcagcctgcacaagttgactttcgtcctgcctgaccaccgcctggtgcagcagcagatcgcgctttgctccggttgccaagctactgcgctcagcgtcaaggccgttgaagtcgcgcgtgacgagctgaagcgtagaaggtggtcactgtacgagtggcgggatacgtacgcaacttcgacaagctctggccccattatcctcagcggactcaactagcaagtggcccccgtgtaaggtttcgccccaagggcccgcaaatttggcttaactaagatttaataattgaactcccatcgtgataacaaaccaacaagtgtgcactcgatactttcggtgtttagtttcttaccaaaaccagccctgctgctgcttgcgtttttcctacagtagcaaagccaacgctgctggttagacgcacattattgtagaagcggaacacagcaacacagtatatacctggatggaagcgatttccgccggtgtgaagttcagaacggtcgcgatggccttctccatgtgctccttggcctgaattgatcacgaagacaaagcattagcaaagtgacagcttgcagctgagcggtccccgcacttacctcgtcttggtctgaggccatgtacttgtacactatattcttcaaatactcgtttgtcttggtcgcgttcggcgtctcgaaccccgacagactgctattggactccatactcatacgacgaacgcggacttccttgaaactgtttgtacggctggcgttgctgctcccgccgccgttctcgtggtagtgcgcctgcatgtcgttcagctccttttccttctgctcaacggcattcagtgcgcgctttcgatattgtgcaaactcctgccggagtgactgcaagtcgccatttccactatcaggaccgtttccaaaggcaccgctggtcatgagcttcagctcctccatcttcttttctagctcttgcttctcgcgaacagattgttcgtatctacacgccacaggtcagcatcagttacacacgcatccgagatagtatgcttcttcatgtagcctacctctccctccactccatcgcgaggacggtttcccccattgtaccgctcagcttctcgtaatccttcatgagcttctcaaactttcgccgccagtcggattcctgcaatttaccaaagcagtttacgggttagtgcacggaatacacgacattggatgagggtaacgtactctctcctcggcttctgcttgggccttcgtgagccgacggatctgtgccttcgacgattgcagctccccggacagatccgtctccgaaatctgctccgtttgtttcgccataacgtttgcgctcatctgcccaaaaacctcggtcagcaccaataacttacccccttataagcacaccacaccacaacgaacctttcggatctcggcgtctttttgctttcgcgtgatctccgatcgaacacgataacgacggaattcctcctgcacacggtcgatctcctccttcaagctccttttctaatgaaccataataatacatccacagcaaaacagcgatcagctgcacatcttaaaccacagacacatacacgcattgcattccaaacgtaccatgcgatccacctcacacggcgtgagtgaaaagtccggcagcgtcagtggttctccggacgctctgttagcatacgcctggatctctccttcgttccggaagcaatgccacgcgacctccttggactcgtcgaactcgttctcgttcgcgtactccacgagacaccagagcacattgccgtgcgagaccttgtgcagcagttgcctcgggtcgcgcgtggacgcgtccacgaaccacgagtgctggctctgctggctcttggtgagctgctcgcgtagctgctggacggtctcgtccttctccgccagctcctgcttgctgttgtcgatgctgcgcttggccatcgccagcagacgcttcagcttgttctcctacgatcgcccacagcagcataatagacaaggaaaagcaccgtcagcctcctctccaacctccacagcgcactgctgcaccctcaagagccgcagatcagcgctcaatagctcaccgtctcctccatctcctgtatcttggtgttcttcttggccagcagctgctccatccgcgcgcctcgctccttccagagcctcagctgcgtggccacatccatgccgccattggagcgcggcggggacggcgtgggcgtgggctgctgcggctcctgctcctgctcctgcggctcggcctcctccacctgcgggtctgcagcccacgcgtcagaactcacgctccactgaccccgttcagccacagacggcgacgcgcacgtacagtcgtcccccttcgtcctcttaccttcagctggcgcctgcggagtcgcgtccacgtccatggcggtcggtcggtcttcaagtgagaaacgtggcctcgagcttcgacgcgcggtacacaaccgttacaccaattttgagcagcctgtcttacgtcatgccacatgacgcagtcgagtattgcgacttgagtcccgtaaatatggacgtcaagtctattgctcgcaggtatggcggcctgtcggcgcgcgtggtggcgcgcgcggaggagaactggcgcgtgacgagcgccaagaagtcggcgggtctggacgcgttcgcgggccccgtggcgtgcatcctggtggcggcgcgcgccttcgaggaggcggtggacaagagccggctagccaagtgcgcgggcgccaacaagcggctcgtggagcccactgtgcgcaaggtggtggacgccgtgggcgtgcgctccgtagtgcagacatcgcccgccgcgctgtgcatcaagttcggctgcgagggcatcacggagatcgtcaaccgcgtgctggacgagtaccgcgcgtacttggggcaggtggcggccgccaacaggaagaagcgcgccaagcacccgctgggccccgcagtggccacgatgaacgacagagacccggtgttcgtggccgcgtgcctgtacgcagtcagcaagcacgccaaggtgagagagggggaaggatcgagggtctgtgtgtgtgtgatcttgaagagccgctaacgttgcgagtgtatgggggtagatgaacgtgaaccaggacaagttgctggaggccgtgtgcggcaacgctaggtcctttgacgctattgtttcctctattgaggtgcgtggacgagttgctgattgaaagggtggaagagctgcgttatgacttggcttcggttgccgtgctgtaggctcaatgccaggcttcgctgaacggtgcggtggtagatcggagaaagcgccgcaacacggcgagcgaacgggcagccaagaagctcacggaggagcaccgactcgagcagctggaagaggaagagcgcgtgaagcgacagaagaggagcctggatggcgaaatatcctcgccgccgaagacgctagcacagcaaagagtgctacaaaagctgcgggcagctcgtgcgggtgctgtacctgaacaaacctttggtgcaggcaaagctgctgcagttgccacacctgaagagtacgcggagtggcgagcaaaggcgctcgagttcatgcgcaacaaaaagcagcaggaaaggatgagcgacggcagtgtagaaaagttggcagtcgggacttgagtagctaggccacgactcgcttcaatacttggaagagctggttgccatgggtactgtgctctattctaactaatataggaaggtaaatgaacaggttgcatcgcaatcatcaaatgatgctagaatattcaaacacgttgcgagcttgatgcatcgcaccgctgacccacccagaggaggcagcgtagactctatccaccctgctgtgaagccgggaaatttgtgcgcatgtatgccgcctaaagcttgatcgccttagcgacggcagggaaccgctttgtgaaggtgtcgtcggcgccaatccggaagctccaggtgcgcgttgccgaatccagaacagcgaactctacgtgtaaaaacattcacagacgcactcgttagacattcaaagtccggcaggatgggatgatggagcacaaatcttaccgctcaaaatggtcttagcgacgtcagcgtccagagaaaacttttctaccaactccattcgcgatacaccggagggtgtcttcgtcagctgaaatgtacgcaagcaaaacagttaaggctccgagctggcaaaagttcaacagaactgttgacgtaccgccttgataatttcattgcgggcgcgcacagtcgtctctccgcggcaaaccaaggcgctgctcaatcaaaaacaaaccagaatgcaatatcagtctctggagttcacagatcaaagcagcgaaacgagtccgcgacgcacctgttgggaagcaagcgaccccgcacgtgcacagccacgtgcttaagcgcatcgaggagctcatcctggctgcgcgacggcagaagcttggcgagcgtgtcgaagtgcatgatctgatcggtcgcaagtagtcgcagtacgtccgaatacttgggatcaacgccgtcgagaaggtgtcctgccaccggctccattgtttcgtccttctggtcctcgtcttcttcgttggttctgttcgccacaataatttgcatctcttggtcagcttaccgctaatataaatgcaacacacaatgtggggtacgcactgggcaggggtagtcggggccgcagacttgttgtcagcggaggccattgcgcggtactgcatcgccttgatgtactcgtcagccgtcatggtggacaccacctcctcctccttttcactgaacaagttctcgaactcgtcgtcagcaccggcgctctgccgaaataaatggacacaactcgtcagcttcaaacaacctttcaggctcaaagcacctgacaaaacgtacgctcttgtcctgcacctggagctcgatccagttttcggcgtcgatctgctgcttcttgtacgcgtacgagttctggatggcggagatggcgcgctccgactgcttcttcttgaactggaactgcacctccttcatctctgcgggcggggcctccaccttctcctccacttccatgtcctcctcctcctcgttcactgcgtcgtcaatatgcgccaggctcggacgcatctgcatgactgcggacagcggcgtgaggtgcagctggccctggcggaagacgcccacggcgtagttggacagcgccggcacgctggccgactgcaggcgcaggtgcttctgcttcaggtactcctccgcgtcctggtcgaagtgctcgctgcgctggtccacggggaagtccagctgcaacagctggttcgtcggcttgatgcgcgcgcggcgcggcggctccggcatcgggcggtacgtcggtcgcagcgggaactgcaccatgtagctgctcattggcattgcgtcattgggctattgcgtcagaaatccataggagcaagagcgcagcagagcgaagagcggtgcacgtacaggctgttgcgcagctcatcggcgagatgcacggggatctcgcgcaccaccgggtcgtcgtccatggccacctgcgttgagtcgcttatcgtccagtggctctttcgggtgtagccatttttgctgaatgtcactgaagcgagacttttgtccctcgttttagtgggaaaaggtggcgggcgcggacacttcattccattcgacctggagccagcgacgccgagcatgtcgtccattcctcgcatcatcgacaggtaagccccggcgttctgcagctcgttgtgtagagggaggaatctagtttgctgctgtgaagacgcggtggctcagcgctgcctgtggccgccgctacggcgcggggaagacgaaagatctcattctgtccactgctctctcggctctgcagcgacagcgactgcgatgacgacgtcccgctctccgcgttgcgcgccaaggccccggcggtgaaggaagaggtcaagacggaggtcaagagcgaggtgaagggggagctgccggcggtcaacgggctcagcgccaatggcaacggcaacggcaagcggcaggcggcgcccgacagcgacagcgacgacgacatcccgatcagcggactggccaagcgcaagaagatgaaggtggagacgaaggtcaaggcggagaaggcgtccgtggccacgcccagctcgcgcgcgacgccgcggaacaccccgcgcaagaccaagaagagggtaataaaggtgagtgagcccaggtgcgcgaaagtggttggttgctggggtaagacgctaacagaccgattgtgcagattaaaatccgccagcaggagtgctcggaggcgctgtacgagacgctcaagggccgactggcgcaggagctgctgtgccgctggtggtacgcgatggagtggccgcccgtaaagaaatcagcatcggtaagtggcaacaaatcatctgtaggtctattgaaggtggagcgctgggtttgctgatttgtttgcgttttcgtggcggtagaaactgcatggtgttcaggagctcgacggataccccggcgccttcatccgcgttaaggtgagttgtgtttcgtaaattgggatcgcttttcgccgctcttagcgattgacttttcgttgctctagggcgatgacttaggctcgatcatagacactcggtcatcagtgggcaagccgtcgttcctgcactttttcgcaatgccttcggcggatctcctcaagctgctactccaggcgtacgacaagcaaatggaggtgttggttgagcacgaggttcgtggaatgtttctccttgttgtgctgaatcgactgctgacatattttttgaactgagcagggaccagataccccgctactgaagcaattgcaaaaggagcgcgcgtcggcgtcgcgcattgacccggacaaggccgaccgaagcgttcggaagcttctcaaggagttcgccgagctggaccgagagatcaaggaggtgcaggctctcgcgctcaaggaggaggaggagaacaacgaggagaacggtgacgacgatgaagatgacgacgatgacgacgatgacgatgaagattagaagagtttgctgttgctgcaggttgtagagcccgcaaaacaccaacgccaaactcttcgagaacacgagtgcacgcaacccagcagtaaaacacacagcaaagacccccgacatctgtagacgataaacacagagcttttggtttcggtggtgcggactgcgaggcaacttcaaagatcagcaacaggcaaaccacaactcaagtacaagcagcatgccaaggtctggccatacaatatattatccgccccaaaacgcctcaacacactggtatctctagctggttgacacgcttggcgtggtttggtgacttgccgcttctcgcatgcttagaccccaggcccgtggccttgtaaaaaaaacaaatctattccagcttggcgcggagcgagttgcggaagtaggtgttgcccacgcctccgataccaaaggcaggtccgatgcggccgacgcgagcaaacacggacttgacgtactcgcgctggacgaagctcacgcgctgcgccatggcgtggcccttgttgttgtacaggtcgaggcccatcaggtgcagcggcgtggacaggaactgcacggccgcggggcacacaagctgcgcgaaggtgctggcgttgcccttctccatgaggccgttgtcctcgatcttcttggccagcaccttgggggcgttgaaggacgcgccgcacgtcatggagtcgcgcacggcgaagaggccgatggacgtgagcgggaaggcggcgggcgcgatgacgccgaacatgcgcgcgaaggcgcggtccttggcgatgcagagcgacatgttgacggccgtggtgccgatgaacttgggcatctggttgtccgcctcggcgtactcgcagaccgagtccacgacgttggccgtcacgtacgtggccgtgtagagcccgaagatgaggtggaactcgcgcttgcccacgaagcgcagcgggtgcttgaggaactcgacgctcagctccttgagcccgcggcccagcggccgcgcgccgctggcgttctcgatgatggcgcggtccacgatggtgatgaagggcgcgacgcccagcgacgcggccatggcggcgacggtgtccgccacgagctgcttggccagcgtcgcggggccggcctggggcttctgctggtcgctagaggtgtccgccattgggtctgtcgtccgcaggataagagcaagtggcggtggctgcgcagggcgcggcgagcagcgagcgctggctgtgcctgtccacggggccgaacgtgagcgtagctgctcgacggtgctcgaaggcgctggaactgcagtgggcccggtttgtgcatcgtgtgacgtggtgagggggatgggcggcacatacaaacaacaaggcaaagcgcagcgagccccagccctccatttccagcagcgccgcgtcaagcgggactcgagctctgcgtgcgtgatgcccgcgccgctgagcagagccgcccgccctcgtcaccgggggatttttccgcgccaaagaccagcgaggaggcgagtgagcgccattcatgatgcgccggcgatgaatttcatcgccggcggcggcgcagcggttgaagcgtctcagctgcagatttgccgccagacgagcacttcaacttggtccgctgcgaggtgaggacttcagttgttgtccgccgaggcgtccacgatgcaacagctacgtggagctgttgtaataatgttaacttcgcggaagcaaggcagacgctcgaggtatgcctggcttatctcgatgtggaccgcgtcgttgggtggggcgacgtgacaactgcagttgccgtgttgaatcgtctctcgtgcttctccccccgagtcgtccgcacgctacatgcacgtgccccgcagtgtggcggagctgcgccgagcaaggcaaaatgatcgcctgcgcgtgcatgtatcgcgtataccttggagtgcttggagcgcgatactgtagccagcaaagcaattctaatgataagtccttgcgagggtgcccgtgttaaacgacacattcagctggtcgacttcatcttcacaaggcgttgctcaaccttgggggcagcagccgagcaaaggcctggtcgacggcgccttgaagaccgtactgataatgttgacatcgtcgcgagcgctatccataattgcaagagccaaccctcgacttctgcactcagcttgtccgacgtattgccatactgtaccatgatcgggcctctagtatttcgacgctaaagttaacaaacgataaggaggggtcgaacgagcagtggcaaagccaaaagcttgattgtacttgttaaagggttaatagcggaggaaattccgatgaaaacagctatccctcgcaaacagtgctatcgaagggtgatgcatttacatgcgcttatgggcgcattttcttgtgtaacgagcactcgcctggtgagcgctcgctaaacaagggaatgggctcgtaaacgcaggtacttagtaaacgttttcttcttcttcatgactctgagaacttggtgtgcgccggatcttgcgggtttacggtgtcggcgagaggcctgccgcaacgcagccagccatgcaggtgcccagcgcggcgttgcagccgatgaccgcggggatcgagccgacgccagccgtgaccgtgccaaacaccactccggcggcggaataacacgccacggcgacagcattgcagccggtctggcagatgccatacgcgagggggcccgcgctaacttcgggcgcggcggcgagtcccagggcgacgagcacagcggcgagcttcatcttggattggggcttggattggtacttgaggtgtcttcggcgaaatccaaagtgagcattgttgttgtacttaagtagctgatgctacactgtgtagccgttgccggggtctagcccagcaacaccaacgcgctgcagaagatgaacagctgcagcaagtaaggacggttgctcaactgatcaagtatggactgttatgcagacgcagcaagtacggacgatttgtgccaccagagtggtcacctccaagagcatgcataggacaagagcagctactgcaaactaaggaaccgctcaatacatttcacttctggaagcgacacaacaattgtgaagcctcgagtcgaggccctccggaccttaatctcagcttgaagacgtcgaagctgcgcacgtggtcgctgtgcattggacgcgagatgcatcgtgggatatcccgactcttgttgagcaagttgaagagatgattccaattgtgcccagcgtgctccaagacggattgaggtcaattgaattccatcataacgttagggcgaacgaccactactgtaaagcagtgagaagtctggcgttgattttgttgtttttaggaatccctatcacgagctgtagcagcgctgaggcggctactggagaaagacgggtccattcgcatgaatttacgggttcattgtcttggtcaaccggagcactcctgcacagagcggaaacgctcgtcaagcaagataatgaacccgtaaacgcatgtaagtgcactcgtcttaccaatcgggagctctcgcgatgctgtcaggcccagctatggcgtcggtgccatgccagccgcaatacaagctaccgaatgcagcgttgcagccgaccacagccggtaggaacagaactccggttgacgagtagcaggcgacagcggcggcattgcagccagcctgacagagcccgtaggccagtggtcccgcgttgactttggcagtacccacgagccccagcacaatgggcgcggcaacgagtttgttcagcatcttggcttgaggcttgagtatcgagctttcttcggcaaaacaggaagtgagctccgttggatgctgagcgaaactcggcctgtggttgaaggcatctttccgagtaagtcgatattgccaactgccttgaggtaccgaagtttcctgggctactgcttatagtacagttgaaacccaagaagttgtatactttgtcaacgggatcaaactttagacatcatccatttcgcttcctggcagtgaagaacgacccacattgtttccaagcgtcaccaagatgctgaagaagctcactgctgcgctcgtagtcctggggcttgctgctgcggtcaacgcgggcccggcggcctacgggatctgccagactggctgcaatgtccttgccgtggcgtgttatgctgccactggggcagtcttcggtacagccataccggcgatcatcaactgcaacaaggctctgggcgtgtgcatggctagttgcgttgcggctggcttgataccgacgccgtagctggcaacgctccaaacgggtaagacggatgcattgacctgctttcacgggctcattcgcttgatgaacgagcactcccgcagcgaccaagcgaaggaacccgtaaaagcatgtgactgatctcgcctcctccaaaacctacgtgatgatgctgaataggactcgatcgagcgagacgtatttcagtgagtaaccacgaatcaacttcgttttgccattgcgttggcttgattcgtgacaacatttttacgaaggtgctgttgcagatcacaagcaggcagggcaccatgatccgtgaatacaacttcaacgtggctacaactgctgctggatatgcattgatgacccgaggtggaccggagtgcgccgccagagagacggtggccagtacagtaacatgaagaggacgggtgaccaaatcggaggtagtgtcatgttcgcaagtgcgccttttgtcttcacttccctttctccccggcaggcaccactggagacgggctgggcgttcctagagccatggcgcgagacgctctgcagcgcgctagctccttccaagggccccttctacacgggcgcgcccaacggcgtgagcgccaccttcaagctctatccaagcaagtacaaggagccccagttccgggtgtccgactgcacgctctgcgtcgagttcccagccgaccaagcgagtcgacaagacggcgctcgcctgcagcggctccgcgaggccatagagatcttcgaccgactgtcggcggtgaacaacgcggtgttcgtgacgctgctggccaaggccatggagcccgaccagcgagcctgtcagatgcctgtctggccgacgtggaagtgcacgctaagcgagccactggcacctgacgactcggctgccattaagtcttgtgtgacgtgggccgagctcttagggtgcccagcagacccgtgggagtactcgccagagtttcgtgatgtcatggagaagctccagacgaggggcgtcatgcacacggggattcgtcacaataaggtggtgactgcgagctggttggtgaagatgaagaagctgtggtcaagggggatcagacactcacggacgagaagaacgcgactccgacggctgatccgctcgcccgtgagctgggaaagctgctgggattgatggctccctccattgtccacgtgcattcggttcgtgacagcagtgcgctcacggaaacttggagagagaccacgacgccaatgcgagctggagccttggacgactccaccacagtttgctgcagagagttctcgtcccccgagatgcttcaaacagccgcagcgctctgtcaaactaacacgaacagtgtgtcactgtacctggaggattcccccaacggcaacaaggctgacttcgcccagggcggctccttcatgagctcgctcgtatctggacgctcgacgtgccgatcgaacgtcggtgcccctgagctggagcgaaaggcgaggttggaacatttggcggtggtgtacgagactgtgcacagcttcaggaatggcgcgatactctcagcattcgctgacgcgtcctcgatcgatcgactcaccctcgtcaaggctgcgaacgataagcacgacgcgtgcctcgagccattgcactggggctggctggcgtatgctctctggggccgcacgtcaaccgtctcaattccaactctgaggctgtctcccatggacctgacagaggagctcgtgtctgccgttgaggccgcgctacagaccaactacccgcaaccacaaaggggctcagcttcgttgtatggatttgtggacatcctagaaggcacagagctgcgcccgtgtagacgcagtagtctcgccctagtactatcgcgagactgccgctgccgagcttactatgacccttccagcatgggaagccaagcgaatgttgtcgttcctggctacggaatctgccaagttgaactggaggaaggaacgatcgagttcgtgagcgatgaagcctcgactgacatcacgatgcaggaggcaacgggctcgggcggtgtgcgctcactgatcgtggacttttggcgcctggaggacgacgccttggtgacgcgcctgctacgactaatcggcaggaacctcaagtctctcgcgcttgactttagtgagaccagcgacgacgttgaagtcgatttgagcgaggttgcggtggcttgtcctatgctgaaagaacttcggcttgaaggctgcaatgcgtcgatctcaacacacaacgaggccctgcgtaactgggggatcaagaagctggaaatctacgagagcagagcggtggatggcctcgagacgttgctgagcgaccagtcctaccgaacggcgcgggggctggtggagctggcgttctctgctccgcccgacagcatgaacgaacacttctttgggttttcgtatcacgggatgccggccgaggataatagattgccgcgggagtatgtgagcgcgctgatggcccaccgcggggagctggtgatcaaggaaaagtttcctgtgcggccgaaactggcgatgctgagccccccgattcctctctgagatcgatgcaatacatggactcgagcatcctgagccggatctttgccttcgcagcggttccagcgcagcgctcggtcgacaagtatgatgcaagggtgcggtgaatgacggccgcaacaactgaagtagcgagctacttactgttaggtagcattgtatatatttgaagccgtcttaccgtacttcacaaagtaagcaattgccaaaattgcaaaaatgctctcgctgaaaaggtggccgcgaactcaaaaaagtgtgcggaaaagatcgcgccctttcagacgttttgcgccgcagaaacgagcggcctttccgatacgttctcgtactcggcaagttgctaccagcggcccccggcagcaggaacagcgatgtccatgttcgtggtggtgggctccaaggagccgctgtacaagatggagatgcgcgcgcggcgggaggagagcgcgcacgtggacgagttcgtgctgcacgcggcgctggacctggtggacgagctcatgtggacgacgcccgccatggcgctcaaggtcgtggaccggttcaacgaccagctcgtgtcggccttcgtcacggcctcgggcgtcaagttcctgctgctgcacgagacccgcaacgacgacaccgtcaaggccttcttccacgaagtgcacgagctctacgtcaaggtgaggggcgcgcgcgacggagaagatccggggttcgtctgtcaagatgccaactactgcttcttgttcttcttgttgtccctacttgtagctgctgatgaaccccttctacgagcacgacacaccgatctcctccgaggtgttcgacgctcgagtgaagacactggcgcgaagatacctgtaacgcgcgaaaaccaactcattgacacgatgcaaactcttccacgacgtgcaacaattcaacatgaacacaatgaacaccacagttgggagtaaagccgacgcagcgtgcgagcgcgcgtctgaagtagcttcgattattgcaaaatagctctctggttcattccggttaagtggcggctgcgcgtagcgaccgaacttaagcgcgcacaacctggccggcaatgcggtccaagtcctgctggccgtggctgctgatcttgcggccacccttgttcacgccctcagggcacttctccacgaccttcatctcctccagctggtgcaggatgtggcggatgagaccgcccgaggccttctggaagtgctggcggtgcacgcccttgcgggcggcgccaccgtacaccttcttgagcgagcccacaccagtgtactggcgcaggtacaccttgcgcgcgatcgaggcggcacggatgtagtaccagtccgggtcggcgggcgagtactccttgaacgaggccgtcttgaccacgtcccaccaggcgggcagctcgatcttgcccgagcgcttgaggtgctcggcgtaggccttgatgaagtcagcgggcttcacgtcgcgcaccgtcacaccgcgcgtcacttcttcctcgtcgtagtcagccatgttggagtctgtagcgtaaaagggagggggggggaatcgggaggaaacacggaagttaagaacacgtctgtaccaccgcacttccaggcgggactcaagccatgatagccgagtccacgtcagtcgcgcaggacagtctcggtcttaagacacatcgttattataaataacgacacattccaaagctctacgacgactaatcccgcgctctagcacagcagagggcatgggggcacgtacttgttaggagaggaactttgcaacaaatgccgagctgttggcgccgccgtccgggcagccccagaagccctccgccagtgaaagctgcgcgcggactttcggccaataagaacggttagagcggcctattggcgggccgccagtcgatgcgatcggatttgggagggcacatgccggatcgcaggtcggcatgccagatcgtaggtctggcggtgtccattggctggcctgcaccgagcgcccttgaacgcaggatcagtcgcgaatcggagtcctccgctaagacagttacgctactagctacctacgatgttggttctgttcgagacggccgcgggccacgcgctgttcaaggtgcaggatgaggccaagctggccaacgccgacgacgtgttcaagcacttcgccacgcccgagaaggcggccaaggtgctgaagctcaagggcttcaatgccttcaaggacacgaccgaggccgtggccgccgccaccgacatggtggacggcaagatgggcaagacgctcaagaagttcctcaagaagaacgtggtggacgccggcctcaaggacaagctggccgtgtcggacaaggcgctcggctcgctcatcaaggacaagctcagcatctcgtgcgtcaacgacagcgccgtgaacgaggtcatgcgcggcatccgcgccaacatggacacgctcatcacgggcctggaggacgacgacctcaaggccatgacgctcggcctgtcgcactcgctctcgcgctacaaactcaagttcagcgccgacaaggtggacacgatgatcgtgcaggccatcggtctgctggacgagctggacaaggagatcaacacgtactcgatgcgcgtgcgcgagtggttcggctggcacttccccgagatgggcaagatcgtcacggacaacctgcagtacgccaagtgcgtgctcaagatgggcgtgcgctccaaggtcaagagcctcgacttctcggacatcctgtcggaggacgtggaggcctccatgcgcgaggtgtgcgaggtgtccatgggcacggacatctcggaggaggacgtgaccaacatctcggccctgtgtgagcaggtcatctccctcacggagtaccgcgcgcagctcttcgactacctcaagaaccgcatgaacgccatcgcccccaacctcacggtcatggtgggcgagctcgtgggcgctcgtctcatcgcccacgccggcagcctcatgaacctggccaagcacccggcctcgactgtgcagatcctcggtgccgagaaggcgctgttccgtgctctcaagaccaagcacgacacccccaagtacggtctcatctaccacgcctcgctgatcggccagaccgcccccaagcacaagggtaagatctcgcgtgtgctggctgccaagacggcgctggccgtgcgcgtggacgccctgggcgacgccacggaggccaccatcggcttcgacaaccgcgccaaggtggaggcccgcgtgcggcagctggagaacggcttctcgggcatccccaacagcaacggcaagaccaagaacgaggccaagaagtacgtcaagacggagaccagcaagtcgtacaatgccgacgccgacatgaccgtgtccagcagcaagaagcgcaaggccgaggacgccgacgaggaggaggagcccaaggtcaagaaggagaagaaggaaaagaaggagaaaaaggagaaaaaggagaagaaggagaagaaggagaagaagcacaagaagaagaagagcgccgaggaatagacgcaccaggcatgcaggtgaccgggcggatgtcccggtcggttcttgtagctagacagacacgactgtagctgggtcgcctggtcgcttgccttgccccctcgctctttattgtttcttctaagggcagccgcgaggcccctagtaactttaacatttgctttccattttcattcccacaaccgagttgaagctcatcatctcatggtctccggtatctttcggccgacacttgcactcagtatagaagagtcgcagcgcagcacaagtccgacagccaagagagtgcatgagcgagcctgaacaacccgaaagcagcagcaagcccatggatcgctggctggaggtgcgcggcaaggtgcagaacgtcatgttccgccagacggtcatccgcgccatgcagaagcgcggccttgagggcggcgccaccaacgaccgccaggaccggaacctggtgcggatgacgctgcgcggagacccggagcgcgtcgagggcctcgtggcggcgctgcgggagggaaagcccatcaacgactggggcgccagagccaccagcgtcgaggacgtggacgccgagcgcggcttggcgctggaggcgcatcaagtgaccaccgccaccgtggacaaccaccgctggaaccccaactgcaccatgttcctgtagtgtacagcagcaggagatgaagacgagggagagcagagaggcaaactagtctatatatgcgttagtactgcacgaaaccagagccgcgttgtgtccgttgacttgactagagctggggctgtgaactccgtcgcagctaatcgtcgtcgctgtcgtctgcgttcgtctggccgccgcccagcattcctgccagcagcgaggacgggtccgtcgagcccatctcctcctgcgccttcttcatctcctccgggtctgcacacaacagcaagaaacaaccgtcagtcttctctccttccttttaggcccccagatcttcctccagcctcgcactcacccattccctcggacagcttgggcagcaggtacagcagaccaatgggcacgatgatggtgaggaaggacgggctcatgatcatgcccagcaggttgaacttctcgcgctgctcgaagtagtcgagctccttgacggcctccgccacgagcgggtagctggcgcgcgccttgggggcgcccgggtacttgtactcgagcgcgcggatgaggccgtcggcgcccacgtccaccttgtactggctgaagaggaactgcgtggacgggatgtcgaccacgtagcggcccgggcccacgtcgcggaacaggaaggagccgtccgagcgcacgaagaccgtctgctcgccgccgttgagctgaaccttgagcggctccacctgctccgtcacggagcccagagggtacacggtgccgctgatctcgaacgcctgcacgcacgccgccagcagcagcgccagcagcgcgcacagcctcgcggtcgacatcgtcatcgtcgatacaagagtgaagaggggagggccgttatgggcgtggtgtggtgcacacactcctcccttcatgaacctgtgacagatgatactttacctgtctaacgtaatgctgaagcgacgcgcaggtgagtcaggacccgcgacaactgggccaggaactgctccgtgccactcgtgggaggggttggacggcttccgtcgtgcatacgctgctgtaggtcttccagtcgctgctgggtgcgtcgccagctctcgtgcacgagtgtgttggctgcaggtgtggacgcgcactgggggcggagcagcatgaggatgttccacagcgcgttggctgcagcggtgaacgctagccagctccagccccgaccgtgacgaagctcgacactgagcaggaccatcacgtcgaccagcaactccatccacagcaagtccagttggcgctgggcagcacgctgttttgggcggcgtggctggagattcttcaagcggcaataagacgtcaggttggcgtacacttccagcacgacgtataataatgggagtttggtcgagtgagagctcgcacggatgatgaggttgtacatggagatcaggattggtgtcttcaagcaccttgcgcagcaacttggtgtcgcagctgttctgcttcggatcatagcgatagcgggtgcaacatcgtcgagcgtttgggaatgatgcaccacatccagcgcttcatcgagctgtctgataggcagacactctcgccgaagcaacagcgtcttccaccatcgacgaatgcaggaagcagcgacacactccttatcgccgtacactcttggaacagcggtctctccgtccagcattatcacatcctccaccacgaccatggaaatagtgctgcgcacaactgctccgttctcagggtcgaggtcttccatgagtaccatagcgacgtaccctccaggtgttgtgctgctagcagcaggtgcgccaatacttgcggcgcctgaaaacgtcgagttgaatgaacctggagctggcgtgagcacccgttcattggggaagtccggcctagtcgtactcggcgagtccgtgctcttgagcttgttggatgcaccgaagcccaggtgaaattgtgcgttgaccgaatttcccttgcgagtcggccacaattgctgtaggctgcagccgagcgaaatcgtgagcaagaaggagaagcgcatgctttcgtgcttgagtgtgttttggtaaatgctgctgtgttgcctgcgggtgacaatggtgtctgttcgtacgtttaccttcaatatggtgggcgcaagacatgcaaaggcatcgctacgtcgagactccaaccgcaacttgcaacgaatcgatgtcaacttcgatctcgctccgaacaggccaagttgatcggctcaagcttaaggtaagattgcaacactgtcgttgcttgggtatcctggatattgacaaagctatttaccggtatatggttgaccgaagacccagcgacttacttataagtacgaacaccccaagcaaaactgccagaagcaaaactgccagatagagacgcagtcacaatcaaccgtgatgggaaaaattgcatgccgtgttggtcgacgtcccccaagatgcggcatcaacttgacaatggcatctaagatgccattgtcatgttgaagtgtagcatctgttgagaagatgaagtttgggtctggtacctaagacgttgtggtacctacagtatcggtatctaaacgcgagttcatcgcgtttagcgcgggtccacgctacgaggaccattggattttgctcgagtcgtcgctggacaaccttaggttatctcaggcgatcgaaagatcgctctcttctcttgatgacagtcttgatttagcagcagagtgctcgcaggatggagctgacgcatcgcgcgtgcagggtactattcgcattgcttggattcttgcatggggcgtttgtgcaggctgttcaccaggccgcggcccaggccgagtcgttcggattcgttgcgcttaacacgagtgccagtagcaagtgcgctgcagggccgctgaacgtgtggtttacatttcggcgtgcttcgagctgagcgaagttgtggcgatccacacgtggatcagctcttccgttcgcggctctattcctccctactacgtcgacggcgtccccgtttccgtcaaatactacgcgcgactggggaaccccgtggctccaaccgactgcgacgtcggcacaaccaagctggacgcggcgacattccagagcggaatcaaagggatgacttcggacaaccctgcagcgccccttgccagtccagaagcgatcatcaggttcgtcaaggacaatgggaagttggctacggttgcgtctgcaagtgcgttttactcggtgcagttccatgtatatgactggtcctgcgcaatgctcgcgacggacaaagtcctctccactctgggcgatctcaaggggctcgacgcgacttctatcgctcgctatctcccctgctatcggatctcaggcgcggtcggcgtctcgtacgtggacacgaacaacaagcagcagtgcgcgtgcgtgcgcccggttggtacggcgcttaatggcgcgtcttgcacagccttggcatcatcaaacgaaggagggggcaagtgcttgtggaacaccagccgaccgagcggctacacatgcccctggaccaatgcaagtgcgtccgcactcaagttgatcagcgactgcaaagtcgacgtccttgtgcctagcgacaactacggtcgagtcaacaagtacgacaacctcgccgtcccgttggaccccaagattgaactcacgtctcgcatcgagggccgtgtccatcctcgacacctggcagcagttcctgcttcagcctcaacttgaagtggacggcatcgaattccgcagcttcggagtgtacaatgtgaccatgagcgccaccgacaactatagcgaggccacttgcgattggatgcgtcgccgttgtcgacacgtaccctctgcatgcggtgcagccctgtgcgactgcaacgtgggggtcgaaggcaacagatccgacggccttgacgttgctggatctgcagacggcggtgagcaaggaggcgagcttcttgtcattttcaagcgccaaaaacgtcgtgaacaacggaccaagtgagcgcgtcgatatcgtcacgcggacgatgaaggactgggtagaagcgtcctatgtcgcgatgacttcagcctcgtccgcgtgcttccacgactacgtggttcgtcacttgctggaacagctagtgttgactcagagcccattaatgctgagctctaccgctctcagcagcctgcaatgcatgcggtgctgctccaagcagacaacgctgcgtgaatactactacgactacacgtgcggcgcgtccagcgggccaccgtccaagctgatctctgggaacgagacgtgcgcgttcaaccactgcctgcgtcttacggggtcagcgccggtgcaggtgtcggcctcgcccactgctaatgtgatgaccccaaccgacccgatgactatcagccgcagctcgccgtgccccgtactaagcagcacttgctcgaatgcagctacactatcgagtcttgtgaacacaagcgaagcctggagttctgcattaccgaaccagaacgcctacgttgctgggtataacgtctccgcgtacgtgttctggtgctacaagaaggggaccgacgactgggtgttatgggacgactcggctgtgctcgagtttacttctgcttcgacggcgctggttgtccaggcttggacgcgctgcaggatggttcgacagtttgacttcaaggttgcggtgtctctgttgctcactgccatcccatccagtacggccagccgaactccagcaacaatcagcctcaacggtacgctactagatctctccaagatgcctgcgagttgcctgagcaacgagatgatgacgggattcaagttttccagttcaaacggcgcgaacgcagcttacacgtcgcagtgcgcggccgtcacgggtctaaccagtggtggactcaccaccaagaccacaagctggagcgctctgttgacgagcgagttctactattaatatatctacaagctcaccgcccacctgatggactgcgggacggcggccatcaactccttcaagctcgagaccaagtacgagagtgcctcacacttcactcgctacagctacacgtgctcaagcccgctgagtccgatacttaagtatcatgccaccgcagcatcgagtcgaataaggccatacacggaacttctgccaactatctcgaccgccagaccgtagcgtgtccggcggactcgtatctggccaagacgcagattctcaacgacacgaacaacgtcaatatctggtaccgatccacgtgctgctactaccaacgggccaacgtgacccgcacctcgtacggcaccatggtgccagtgtctgtcgctgggatggtcacgttgccggtgtcgtgcttggccggaggggggatgaacggcttcaggcttgactatttctctgcgagctacagtgtcagttgtctggccgatccgagactgctgccggggccgcagctctacacgaactgggtgtcgaacaacggctcgatcttctctctggtcaaccacgtcatgcaacagagcactgggcagttaccagcttgaggcacaagacagcatgcaccggtacagctactcgtgcaccaagttctgatcacctttgacggtgtgtacacagagcttgatggcgagcagtggatttacgggcaacgcgacggacagtctcgacacaacgtacgcgcaatgtgcaagtggttatgtgttgacaaaggtgcagcttcaaatgcagccactcgggacgtttgcctacagcccgtactacgcgataacctgctgccagtgtccatgaccttgaggtgcgcagcgtagaccccggatactgttggtttggtcaagtgttgtaaaagtttagagtcccaagtgaacttttcgaaggtgatacgtgatgccaacagcatattccctgacaaattcaaatggcagcagtagctttggtgtaaacagacgatagaatggctatctcgaacgagtctccaggcgtatctcggggactgacatcgacgaattcgtctgctaagaaagccggttgacgtcaactccttgatagatctattgtgcctttcggtcattttgccgagtcctacgtaggactttggaggtcagttaatctgaggttggtggtctctaaatctgagatgcatatctcggacgagtccgatgactggtctcctggagtctctccgttcaatgaactccggttggagtccaagtcaagtaatcgctgtttggggaagccgcgaaggcgaaaggcgacgactggagtgtttaacgtatcgactgcatcgtgttttcataggtttattctgcgtttgacatacaccgtattagagtcagctcgtatgaaagtcctgccacaagactaggtaggagtcgttcgtaagacctcaaaccccgaatgccgtaaaaatgggcgacattcgggctttcggctgtttgtaggacctgcgcaagtgcttccatcggactagccattctttgtcctaattacctacgagggacctgataatctactccgataacctagccccatcttagtaggtagctgttttacacgtccgatttgccaaaacaaccgaaaagcacaatactacatgagatcctagtaaggcagaatgaccgaacaaagcatcgtatgaaaacccagcgacagcaggtagctatagagctctacctggcaggtatccgggtatatagtacccacacggcaactcgatgacaacgagtcgttgtcggtcccgctagcttcgccattcgtctcagctccgcagtcaaccataacttcttttttccagatcggcctcaactaacgtattcgatcgtcatgtaaatgaagtgagtgaaattccaagtttggagcacgaatctccactaactcatttgataacgtctcgcatgtatccaggttaccttctgttctgtcatccgttcagcttgcgatcaagacaaacacacggtgtttaccagcagggtgttggtactctccataccgacaaagctcggcagtcaccatgacttcgagtcactagcaaacttccccacttccgatcaagtcaagaccaacatgctgcccaatcgagtatcctcgcttctgttgttggttcttgccctggcaagctgcttcacctgcgacgcctccgtcgtcagtggcaccccaccaagttttgctgcgggcacaacgggcggtggcaactccaaacccgtgtatccaacctccatcaaggagctcgccgctgctctcagtgacaacctaccccgtgttatcgtcctcaagcaaggcttccgcttcgccaacactgagggctccaagacggagaaaggctgtcgtcagaagaacaatatcgactgcctcgccaagaagaacgggttcctaggccaagactcgatccagccgagcttcagttcatgtgacggaaccgcggtcactgtgacgtatgacaaggcagcgctcaacccgctcgtcgtcggcagcaacaagacgctcgtgggcgaaggctccaagggcgttctcaacggcaagggccttatgatcaccggcagcaacgtcatcattcaaaacatccacatcaccaacttaaaccctcacctggtgtggggcggcgacgctatcaccatccgtggagccggcaacactgcgcccaagggcatttggatcgaccacgtgaagatctcgagcattgggcgccaaatggtcgttatcaacttctcgggagccacgggcgtcaccatcagtaactcggacttcgacggccgcaccaagtactcgacgtcgtgtgacggccgtcactactgggggttcctgctcttgggcaagaagacggagctgagcttgatcggcaactacattcaccacacgtcgggtcggtcgcccaaggtcgggggcaccaacggggagacctccgtcgtctacgccgccaacaactacttcttcgagaactctggtcacgcatttgacgtgtcaaccggtggttatgcgctggctgagggcaactattttggttcggtgaagttgtccagtggcaacgatgcgaagggcaatttcctggtccctactgcgcccggcgactgcagggcggccatcggccgcgactgcaagctcaacgttctcgccaacagcggcgcgctgaagggaacctcgcaaggcaaagtggcttcaaagctcgcaagtgtcaaggcgatgattaagcagttcaaggtggcgtcggctgccaagttgtcggtggggtccagaaactttggtgttggcggtcttggcaacgacgctgcttaatcaggtgatgaggaggaggatccggctcaatctgtcgtgcagacggtcgtgaagcacaagggcgcaggcaaaggcaagtgatcgtttgtccagtacaacatgttcaatgagtagtagctcttacgaacaattcgaacaaatgcatcgtacgtaagttgcgaatgatgcatttgctcgaattgctcttacggtggtaagaatcagtaagattgttattgtatgcatgctacgtagtgctcaacggcttttcagtggatttcccggcgctgagttgttagcattggtttgattttcttgggttcagaaccgtaagtcacgagctatgaattcaagttcgtatcatgtggatgcacgagatggtcgagatggtcgatcctttattttgtccttgatttggagccacgacacgctcctcgtgcgcagcttcgtgatggacatcctatcacacccagtttgaccgtttggagtgcaataccaatgtaccagtactgtaggaagtatgaggctttcgtttatgtgcatggatcaagtatttgcgaagtacaaatccacgggtggggtacctctgtcggcaagcgttatcgatctgagagctcatgaggccaacatcattgtttactgccacccatgctcgaacccgtgtggtagcttcaatcggaaaacttcttcgcgccagctttgtctggtaatatgaagccactgatttcttaagtgtgaatgccatatattccctacagcttctacctggtaacattcgaagttggttgcttcactgaaccttgccacgtccgttaccttccccagccacactagggataagttactttttcgttaccttgtgcagaagtcgtgcgagtggctgtatactaggttcaacaaccccccaactcttttcactctcacttttacctgttaatcaacagaccgcaccctcctacataacttcaggcaggcaggaattcaaccagcaaaaccctgcagccatgtcggagctgcatcgcttctggagcctctacgcggactcatcgtgcggtggagtaccaaccggtgtcttcatgcgagcgctgagtgactgtgcttcccaggtcgcagccaacggagcaacgtgcacggccaagacggacgccggcgataacgtcatcggttatgtgaacgaaagctgccacgaaggccgcatcgctggactcgacgctctctacggtaacaagtcgtacatagcgtatgactactacacggatgacgactgctctcgatatgagaactcggttgcctaccaagccagcacaagctgcgagactgtcgtagacagctacggccacgtgaggagcgctcgaatggcggtatcgggcgagaggttggtgttgacccaaaacgttgggcctgtggacaaggcgctcaactgcccgggctcgaccgggcccgattacaaccaactcaatgtcctagtagccgagatcaaccacaacgtgtgcgagagcaacttaaagagcatcgacggcgggtttatcttctacaacacgactgccaccgctaccgcactgtcatcgtctggctcgagtacggatatcggggattggagcagctccggtacaaatgactcgtcatttcctggggatggtctcgctgtgggccccatcgcgggcacagctggaggcgccacagtgctcgtcattgccctggcgtgttgctgctggaggcgaggccgaaaagatagcacaacctcattgcaagacccgctgatcggcaagggaaacagctcgactgcggcgttccccaccgattcggatctgggactcctttggaacgacgacgccattgtcgcccaccgggttcctcgggaccaagtgcgtgtggacggcctcatttctcggggcggcttcggtgaagtctttcgagggtcgtacaaccagcacgcggtggctgtcaagatgctgctggcagacacgcgaagcgacctcaagaaggtgaatttgctgctggaagaggccaaactcatggtgagtctcagccacccgcacattgtgcgattcgtgggcgtttcctggggttcactggctgatctttgcgtgctgtcggagctgatggagggcggagatctccagtcgttgctaaaggatctcgacgcacgaggacacgcgcagggcttcgactacgacaaagtccttatcgcgtaccatactgcccaagcgttgatgtacctgcactcgctctcgcccatcgtgatccaccgcgacttgaagtccaagaacgtgcttctgtccaaggacctggaggcgaaactcgccgactttggagcctcacgagagcgacaggagcacacgatgactgcgggtgtcggcacgctgctgtggatggccccagaggtgatgctggccgagcggtacacggagaaggcggacattttttcgttcggagtgctcctgtcagagctggacacgcagaagctgccgtacgcctcagagactgggaaaaagatgccggacgcagtgctcatgcaaaaggtggcgttgggcaccctgcaagtggcgttctcaccctgttgcctctcttcgctggctcagttgggcagggaatgcgtggagcttgatccgagcgctcgaccatcagctccgacggtgggtttccggctgcacactgtcatgaggacggaattcgctagtgtgcacgatcaaccaggtagaagataacaacaacatactcgtgctttgcctacctcgtctcaaagcgaagtcatcgagggaactcctccgtcgagatctgatgccatttggtagttttcagccatggcgctgaggctcgtggacgacgacctggtgctggaggccgcgctctcgctcttggagcagcccgacggtgacagcacgcagcgaacctcgaccgacagccctcaacgccagaacaacaagaagaagcgcaagagcagctcgaatcgagcgcgggaggctcagtaccaggagctgctggcgttgcgtgagcaggttccgcgactggagaaacacttggccgagctgcaggagcaggctcagcacaagagctcgccgatgctggacttgtggaggaagctggcgacggtcgagcgtcagagtcgagcgaacgccgaggacgagaaccgccgactgcgcgcgttggtgcgtgagaacgccgacgcaacagcccaaagcgtgcaccaactgctgcagactaatacctgcagacaggagcatagcggtagcgaggcggacgcttggcctccagagcggtggccctaccgacacgtgtacgctgtgccagtggatccgtctgatgggaacctgatccaagagatggcgacgagtgtcgacgcggtgtaccgccaagtgcttcaagtgtacagccccgagtccgttcaagggaccagtgagtgccctgcgactcggttccagtcggtggggaacgcccaccgccgccgcttcgccgacaaagagctgccgtttgacgtcgactcagtcgccgacgccgcgtggcagttcttcgcgcactcctcccgacgccccaccacgcggttctactaccacccggacgcgcaccaggctgcggggctcgtgagcgacgacacggtcgtcgagatcttcggcgaggagcatcgcttcggccacgtgctgctcgacatcaagatcaagcagatcgtgcggcgctacgtggcagccgaccgcgtggtggtggcctggcgggcgctgctgagcccggacaagttcaagacggagacgctgagcgacgtcgtgtacgaggagaagggcgcgctcgtgatcgagccctgcccaagcctcggtggaggagcagcagcgtccgtcgttcacacgtggcagatgatcactccggacatcgcggcggcctcgctcctccagagcgaagtggtgcaggagctcacgcagttcgttctcaatagctgcagacccggacgcgccatccagagcatggagaggactctgcgagcgcattgacaattggcattgacggcacgaaggttcatggcaaagcgtacagtatacgcaagttctcatttacggtctccttgcaacaagctccatcttccatcttcgcccgaatgacgtggcctgcttcaaccacgagcaggttttggcttaacgcccgccgggtctatgtaggctatccgattcctcccttgaagccgcccgcccgctgcttcagtccgcgatctgccgacgtacgcacacccactccaagctccacgctcctgagttgagaccatgacgctgctcttcgccgagggctccaagaccacggagctgtcggacgcgcggctgcgcgagatcgtgcgcgagacgctgcagaagctcgagacgcagcgcggcgccaagttcgagcgcgcggtgatcgtgcccccggacttcacgcgcttccactcgtacgcactgcaccgcactgcattgccattactgctacataggagcattggtcactaactggttggcttcttctctgtgacttacaggaagtcgggggtgctgtcgcagtatgcgtacgagtatctgcaggacaaggtgacggacgtgttgccggcgctggggacgcacgacgccatgacggacgaggagatcaccaaggtaccgactgagcagggcttagaggtatgaacaagggtgcacctaacgcattggttatcatgttgtggtagatgttcggtgacattcccaaggacgtcttccgtgtgcacgactggaggtgcgttgcgtgccagcattgcttggaatggattgtggggctgacttcgctgtgattttgtgtaggaacgacgtcgtgaccatcggccaggtgcctgccgatctcatccgtgaggcgagcgatggcaaagtgaatgagccgtggccggcgcagatcaacaagctggtaggtctcttttggttgttggaagtcaaacggttgagtggggtggagtggtgacaatgtgctttgtgttgtgctggttgtgtagctgtgggaaggtggccacgacctggtgctctcgatcggtcaggtcgtgcctcacgaggtcatgggcatggccaactacaacaagaacatcttcgtcggcacgggcggcagtgaaggcatcaacttctcgcacttcatcggcgccgtgtacggcatggagcgcatgatggggcgagcggacaacccgctgcgccggatcctcaactacgcgtccaccaacttcctgcagaagctgcccctcatctacatccagacggtcatcggacgcgggtgcgttgccttgtcttgtcttaaactattcaacctctaaacgctgcgtgtttgcttgttgcagagagaacggagacctcgtgacgcgcggcgtgttcatcggagatgacgaggagtgcttcatgaaggctgccgagctgtcgctggaggtgaacttcgagctcctggacgcgcctatcgacaaggtggtcgtgtacctcgacccggaggagttcaagtccacgtggctgggcaacaagtccatctaccgcacgcgcatggcgattgcagacgacggtgaactgatcgtgcttgcccccggcgtggcgcgcttcggcgaggacaagcggatcgacgagctcatccgcaagtacggctaccgcacgactccggtacgacttcagcttcaacgtactgtatgctgtctccctcgttgtgctaacagtgtgatggtttacaggaagtgctggctcacctgaacgccaaccgggacctgatgaagaacctgagtgccgctgcgcacttgatccacggctcgtccgagggccgcttccgcatcacgtactgccccggtcacctcaccaaggaggaggtggaaggcgtcggcttcggcttcggcgacctgaaggagatgagtgccaagtacccgatcgacaagctgcaggacggctggaacgtcgacgccaacggcgagaagttcttctatatctccaacccggcgctgggtctctgggcgtaccgaggacgcttcgaaggctcgtcgcagcccgcaagcagtgcgccctcaactgccgccaccaccaccagcctctcagctgccgccgacacgactgaagcctgcctcgacgccggcgtgggcggtggccccttcaagcacacctaaatttcaagtgtactgtagtgcatccgtcagtcagaaatccagctcaggccctgaataaacttgtccctgtcagcataacgacgtgaaagcttgtttgcaccagcctcatgacgacgctgcaaaagggggcgcaatttggtggtgagttgtattgtgatttccttcctctcttccctcgtcctcctccctctttgtgtttgcttcttgatttgggccgtggaagctcggaggcctcgggacttctttgatctaaaggccgcgagagcacttccctgcttccttccaactaggatcgactggtccctaggcgtgtgttgcagttgcctagttctgcttatagtaaatcagcaaaaaaatagtttcgtcaggttagcacttcccacggttaacaccacctaaccagataagtgttgcctagagccaaagccgcacgcacctccgcctcctggttgtagcccttgtactgtcgccagcactgctccagcgcggcctgctccttccgcgtctcgtcgatccggtgccagttcttcttgagcgccttcttgtacgccgagtacgtctcgccgcagttggcctccacctcgcgcagcctggaaaataagtccgaaaataagaaaacggtttagcactagcttaaccttcatctctatctgtctctaaacatttttaaggtacgcacgtcttgagcacggcggccgtgaccttctcgccctgcacgaggcaggcgcgcgggttggcgtcgcgctgcttgcagcgcatgaactccaggttggcgtccgcgcactcgtgcgccaggatccgcgcggcgcacgtgaggctcgtgttgtccgtgtccggcagcttgacggtcttgcgctcctcggccatggctgttgcggatgctggtgacgtgaagtgtatcggagcttcctggctttgcggagtcaaaccccacaaacgagcggctccgcgtgccacttgcgctcagtatgggctgttttgcgtagaccacaccattttgcattcgcactaaagtacgggagcaagttgcagtgttgcatcacaggtgacgatggaagtgttgcaatgctgcaatgggatcagacttctatgatggagaccgctaggatgtacactagtagaaggccgatggggactaaaaccgactacgggctgcgggctcagtgctgctgctcgaagtcccactgctgacgcacgctcgtgttgccctgctcgttcagccgctcctcggcctccagcacctcctccagctccacgcgcttcatgtgcggctggtcgcgctccttatcgctgtcctgcagaggcagcaacagcaacaatacgcaaggggtagcgttagtgtcagtgaccataagggctttagagatgaaacaataaaaacgtatccgtactagttcgccaaggagaacgatgttgtcaccactgccaacaccaatacaacatcacaaaataggatacacaaacgtgcacaaccgtcaggtcttcaacttgcgcttcactccacgatccattggcgcaggcagtagcgctgcaacggagccgcaccggatgatgttcaggcccagctcgatatcgcagaacagtccgccagcgacgtggcgctcgtatgtgtcttccagaataatgttcgctgcagcaacgagcagtatgcaagcagcagcgttgcgccaatatatccagcaacaccaagtgagccacccctccaccgcatcaagcaacccccgtaacgaaatactcaagaacagcagcaacgcacagtactggtcgaaactccgcagatacccgacgaggtggcggccgtcgcgcagaaccatcagcacttgctctgaaggaagcagcgtccaagcagcacaagcaccacgtcacccgagtcagttctgccgccttaacccacgcttaactgggtcgaaatgcgactaaaaagacacggccagcaccgcaacaagacccccttgcatgtacgcactgtctagctgctggatgaggctgctgttgcccgggaagatgccgctcatggtgctcttggcgctgctcttggctcaggcgctgaacagctcccaattcagaattgagttacgctgcgttaaattgactttcagccagtaagatcgcttttggggtcctatttttatccagtcagacgcagccccggatttgcggtgatccttcatcccaataattgccggcggcagcgaagagctcttcctcctgtaccatgtttgcgtcgcgtgtgctgcggatggcggtgaccaagacctccacgggtctcgtgggtctcaaggtgaacccgaacgcccgccaggacctcatcaagatctaccgccggacgctcgaggaggttaaggtgcgaacagaggctcggtcaggtcaggcttagacacggatagagactgattgttgccactgtttgccgctgcagattctgccgccggaggccaagaactaccgcaacgccgtggagcagatcaccaacttccgtctgaatgtggtggagtccaacgaggaggtaaagcggcaatagggagagagggagagagacggcgttctggtggtgcagcaggagctgactgactttaccttacttgctgtgcattctggcaggaggacgtgattgagcgcaagatcaactgcggtcagctggaggagctgatcgagcaggccgaggacgagctgagcgtcatccccgtctaccttggtgcgttggaatgccatcttaatgctgactagagaggctcatttaactaactgatggttgctgttgaacattgcagagcacaagctgtgggagagccccattgaggccgccaagtaagcgtgctggtgtggcagcgtgcgcggagttgcattgacctgaaacaataagcagcacggacccaagtaaatacacagctactgaaaaaaacacacgatacagaagctggtgctggtgctgtgcgtagcctgatgagcgggagcagtggacgaatgatgcaaaagggtctatgtatttgtctactaccggtgcacaggggtttgtccagattagttgcggatcttgcgactgcgtgagaggttcgacttgatacccgtggtttcgcctccgtacttgccggcctcgcccacgcgcacgtcgcgcacctggccctttcttctgatgacagccttgcggtactgcatgcgcttcttgacgcgcgggttgcggttcagcttgctcttgtgcgccttcaggcccttgttcttcatgatctggtacgacgcgccgcgcttgccaccctcgccctccatgtcgctgtcctcgtcgctggacgcaagcgcagggttctcgtgcgtgtagaagtccttcttggccttcttgagctccgcctggtcgcgcgtggtctgctcgtagaaccgctgggcttccgccagctcctcctctgatacctccgctgccttcatctgcttcttcgacttcttggccgagaccttctcgccgtcggcgctgcgtttgcgctccgacttggcaaagaacttatcgaggccgtcatcggtcttgggctcccgctccgctggcagctccttcgtgagcagatcctgcagctggtcgtccaatacctcgttgatatcctgcagtttgttgagctgcttcttgagcagcagcaagtgcatgagcaccgggtggtccgacacgctcttgccctcggcacgcagcagcaggtagaacgagatgttggccgagtagttgagcagcaggttctggcgggtcatgaggtagcgcagacccatctgcagctgacgcgacttgcggcgcacggggcgcagcttcatgaccgcgggcgtgacgacctcctccagctccttcgtggtcgcctcgagctcggacatgaggcccagcagctcgggcgccgactggttcacgatctgcagcttgtccttcttggtcatcttggagaagtccttgtgtacctgctccacggtctccgcgccgcccgcgccattgtccgccagggtggcaatgtccgcgagctgctcgcccaccagatcctcgtcgtccacgggggcggccccgttctcctcctcctcctctttatcatcctcgtctccatcggcctccggctcgtcgatgccaaagtcctcgtcgtccatcatctccgcctgcttgcgctgtagctccagagccgcctcctcctcgtccttggcgatctcctcgtccgactcgaactcgtactcggccgtgtcggcggagtagaaggtcttgcgggacttgccccacttgccctccatctgcatggccttcttgcgctcgccctcggcgtcgaacgcgttcacgtcgtcgtcatcgtccatgccctcctcttcgtcatcatcgtcttcatcctcctcgccttcgcccagctccagcacctcctggcccgccagctcgtcgtcgtcctcggactcgaactgctcgccgtcgctctcgttctcggacgggtcgtcgtagaacgtgagctccgcctgcttctgcgcctgctgcgcctccttcagctgcttcttgcgcagacgcacctccgcgccgccgtcgcccgtgcgcgctgagtgcctcgccttgcgtcccatagctcgatgtacctgagctgctggcggtggtgcaatagcaacttgacttggctggctgcaacgaatgtaccttgttttcggtacgcacctcaatagtgcattaggatgcatgtttgtagttcgtaccaaattgcacgtgtggctcgaatttcgagcaatcacttcacactcgacacctccatgcgcgcatcagtcgctgcggctcgatccgtggtgcgggcggcggcctgcagccagcgcggactggcgcccaatggcctgggggcctcccccatcctccgccagcagcgcgcgtgcgcgcagacgcagcagctgctgctggccaggagctttacctccgctgccccgcgcgaagacacgcagcagcagcagcctcggaagttcgcgtgggccgagacggacatcgcgccgccgtcgcccggccgcggcatcatgggccgctccgccaacgtggacgtgaccaagagccagaacccgatccagcgctggcactggctgtggaagatgctgggcttcctgaacgaggacgaccggctgttccgccactcgacggccgtcttccagagctgcatgaaccaaacggccaggccagagtactaccgcgcgctggggctgccgcgctccttccgcgcgcagcaggcgctgctcatggcgcacgtgtggattgtgcaccgccgcttggcgcttgaaggcgaccagggcaagatcatgcaggagctcatgttcgaccgactgtgggaggaaaccgtcgtgcgcatccgctaccaggacatctcggagctcacggtcaacaagcacttagcgcaggtgcagcaggtgtgcttcaacgcctgcatcgcctacgaccagggcctcaagaacggccccaacttcctccagacggcggtggcccagcacctgctcgagaacgagacgcccgagggcctgcgcatcgccagcatcgtggccgactacatgaagcgcgagctcaagaacctcgagaaggtcgacgccaagtacattatggagggaaccattccgtggagcccgctgccggagacacacgtcaaggtgaccgacatcccgggggacgacgacgacgtggtgctcatcggacagcgcttcggcaactggcgctcggcgctggacaaccgcggcaagctctactactggaacatgacgacgcgatactcggtctgggaccgccccacgggcgacgagcttcacgagggcgaggagcagaagtaaataatccgcctgcctgcctaccggtctgtcaatcctctcctcaggcggcagatccccccgacgttccatcgatagatagagaataccacaacgggaagcacaccgcagcgctgccagaagaactgtgctgctgtgttttgcctaataactcgcttcgctgccttaatacaaaaacaaaaagctctgcgcgtcttggtgggttgcgtttcgtgttgagttcttagttgtaagttcatcgatcggagccttaattggctgctgctgcctcgctggccttggcctccgctttggccttttgctcggcggccacccggtcgcggcgctcctgcattttctgcctcacgtaggcatccgaggccttggcgcgctggaagttctccgagcggatgcgcaccttctcctctctaaagcaccagtccagcgccgtcttgacgtcgccgcaggcgccgaagaacttggcgtacgggttctcctcgtggcactcgagcagcgccttgatttcctgcaaaaagcaacgggatgcattaatacggtgtattgcgctgcagaacagattcgtgagcagcacgcacagcctggcagtcagggtgcgggcggtccagcggcgtgtgcatcttgcgtccttcagcctgaggtcgagattgactctgcggcttggtggtcaaagcctcgcacttgtctttgctgctcggtagtaatccaggtgcttacgattcttttatcagtaatataatcactaataactaaactattagttctatatattacaaacacaactaaggttgtaaaaatactagtattagtacttgactgtattaaatgaaagtactaccaacaattattgtgatttacccatccctaaacatggtaaaacgtgcaactaatatgtgttggagagtgaaagaaagttaggtcgtgctcgcgatgccgttaacacagattatttactggagggtcacttcaaatatgctggtttcataaaaattaaattcgcaaatgacccaagtcaccccatactttgatggtacccttggaagcatctaaaagatgccctagcacgttttcacgctctggttgctgctagtgcaggcatcattagcactcctatcctcctatccatgagtccattttcaatactcaagctcagttgtttgaagggtcaagtatgcgctatttttagaatcgactcgatcgcagcattatcagtcaagtggttgcacttcatagcatgctctgcttttaataagtatcttcctcccaagtgcaattgcgtatcgtttagagcacacgcagcgctttccgaggatgtatttatccccatgttgaaggacctaacggatttaaagacttttggcctagcatagcaaaaggcgggttttcgcgaccttccagtaaataatctgttaaaacagcatttgtaggcgataatgaggttttggaccgaaaacagctgcgtgaacacgattgtggctaaacatcgtttgattttctaaacgacgctaacagagctgttttgaagatcaggtggggacctgattgtagctggcaaaacaggttttcgggttcgaaaaccaatggtgttcatgatttggcgggttttcatacggaggggaaacagctggcgattgtactgtacctttacgcgccgcatagctaacagcctgtctacttcaagatttcagcgcagctacgcacttgctacgctagacgatgtcggaccacccgacgcaactcgtgccaccacaaaggaaggtcagccggaccaacttcgcgcttagtgggagctctacgaggagtttgatctcctcgggcgcttcgtggacgcacgcaaggtaccggcactttcaaccgacaaggggctaacgcctgctgcttggaacgacatcaccgccgcagtgaacacgaagcataagcgacagctcgataaaggtgagtttggtattgctgttttagttattatgcgtatctaacttgcacttgtgtgaacagcccaatacaaagccaagctgactcggatcatgcgtgattatgacctcttcaaacaggtcaaaggcttgagcggaggtggtgtgtgcgcattgacgaacgcgccagatcttgacgccgatgtctggaagcgccccaccaaggctaagcccaagcaagcaggaaagctcaaagaattccgcaagaagggattcgagcactacatcatctgcatgctggcagcaagtaagaaggcggcattgatcgatccaattgcaatgatactgacttattataataataattgttgttgttattgtttgaaggcgacttgcgcgccactggcgccgatgctcaaagtgtcgctgctcaattgagccagcccaaggagcaaacaggagcacctgatgcagccgctgattctgaaaatgctggcgttgatggtgcttcaagtggcagtggttcaggcgagaaggaatcgtccgcagccccgaagccgccaagtcaccaacgacgtgttgaaaacgtgaagcgcattcgtgacggagctgccagatcgcaccgcaacaagaaatcccggaaggtttcagatgacagccatctacgtgagcttaattcgctggtgaagacgatcaagacgtacatcaccttttagatgcaccaggagatgcagaacgaccacgccagtgctgaatccgaccagcacgcggatctcgtggggcttcttccagtcatcgacgacgaagaaggcaacttggcctttgaagaagctgatgtctgaacagggatccgttggcgttgatatcttcctttattccctcgatcttgagtcgtattatttttttaagttgacatgaaactattagcgatgggaatgatacatgtttgggttggttgatcggttgttttacttagtacaagctgtttcgtaatcatttcagagtaaaaaataataaatgaagctattggccggaccccgcatcatgtaccgatggcgaccggaattatttatttttatcggcgggcagtgataatatatataggttgtgacaattttatgataaattttcgagtttcgctagagctcatttcaccttcaagcatctagcatccagtatgaagtctaggcgaactggaggtgcagaggttcctcggcgcaaacgtgatacttaagtattgaaatcgtcgtgaccacaacgctgctgcattcgttcgttctgttaagcgtcttggtgaagatacgaccaagcagattcaagctgactgctagaagctagcgcctactacagcagcagcggcgtcgggcacgcaaagttgcgaactctgcagctctgtgcaactcgaaaatcgatactacaagagatacatagcatagatacatgcatgcagcacttgaatttaccgaatataccggttgcttatgacagctggcggggcaagcggggaccccggggtcccgtcaaacgcttcaaatgcatccattatagcagtgaatgtcattatgcaccaaacgcgtataggtagcaatcaccacaattactggaggtccccaggttcgctgtcgacctcgctgctgtccgtgtcatcgctgtcggtattgcggttgataccgacatcctcctcactgctactgtcaccttcgagatcagtagcacagaagtgtcaatctcgtcactttctccagcagcttgacgaaagccttgatattcactccacattgttgccgccattcaagcgcgccaattgtcgcttgaatcaaagtcgtaaggaatgggctcggtgctatccgtttcccccgaactagtctgagctgcccttctccgccgcgctaaaccatcaccaacgtcgtttgaatcgtatccacgaataaaattgtgaaccagcacgtgtgatgtagcgccttgagctttcgccctcggcactccgcccgttcccgggttgcgttcctagacaaaggatctagggaactagagagagcgaatctccaagtagatagacggcccgcccgggcgagggatttatccggggccgtgagttcccgggacctttactccctatgggggaagcaagaggtcctgggactcggtcagtaacctcaccttgtgaacccccttcgaatcggttgtttggatcagagggaagctcaaccactgagaatctcctgggagccccgaccttatcagtacgctggtttggtagcaacacaatcaatcgcccggggacgctacctagttccctgggtggaattaacacgcaactaaaatatgcaatcgggtctttcggagcaagactccctcggcggcggccgcaatacttttcggggcgagaccccacgggggagaccctgagaatatggaatgcccttatccgtgccggctagaccgcactccggggggacatatataaaatgcctggggcttcctggatggaaaccctggcaaagatgttatcgatttaaatggggatagcctactagcgcgggtcccagtgatcgcggccttcgtacctcggaggttttgaagctgaagcgacttgagctctttggggagaaagttagactgaattgtacactcccccagggccactggtcctggggaagtgcttacctatgggtttcctactaatatctgctaatcacttgggttcactatgggctggtccggatacccccggggtcgactcttctgacgtcgtcgcacgccctgcgctggctccgtgggttcttctgtgtaggacacacccaataccccggggatgggtactttctccggggaaatgcatctccaaggttggccagtccccggaagcccggggcactatgccacacacacaagcagatatcatcgtcttgatggtcaccaactcgcaatccaaacacgtacgaagcacccgaaatctgcgcttcaaaatcccaatcgtccgctcgactgcattcctagcctttgcatgtcgaagattgaaaagttccttcgcgttttgcggacgtccaccaggctgatgcgcctactccttgaggtggtatcggatgccgcggaagggagtcaggactttatcgctatggccatatccagcagcccccaaaacgtaaaaatgctccggaatttgctccatagccgggaccagatcataatggtggcatcgtgagcacttccctcgactccatcgtagacaaacgctatgttcatgtgccagtcacaaaatatcagtacattggtccagataaaacctttgcggttccaaaatcaagcgacatcatcagtggagacctcgatgcgaatgtgctttccgtcaatagcgccgagtgcttggtcaaagtaagggtgctgggaagcgaaagaatcagcaacgaccgtaggaatattcatcgtcctgtggagggcttgcactatggccccaataccccggatctggtacttgtgtatgcttgagtacgccaaatcaaaaagcacttcctgagaacggcaagtagctgcagttcccatccagtgcagcgtgacagccagtacttcctgttgatcgcgcacggagccggcgataaactgcgcgtacagcgtgccgaaggcgcctacatccattcggaaatggtctcaaaagagcgatcgattctccgacgcgtggatagctgcaaagaacttcttcccgtccgtttttgtaagccccagcttcctcacgatgcgatcatgctaacctttccgcgcagagtgcccaaagactagaggggcgcacacgactacgagaagcagcaacagctcaagaacggagtccatttggtgtctgcaagaacgcctctgctgatgtccgcaaaggccagcttcttcggaaagttaccgtgaaactacgttttgcctgcgaacacgaaaagagcaaaatatttatcttgattccttgcgaaaacaggtggctcggtagaacaagccccaaaaatgagtttgatcaaaactttacctaccgcgaacacgaccttaggccgtgttcgacttgcatccaatccagttgttttaggccaaatacagccggatttgcttcatccagctcgtttgcaacctgaaacacccaaaaagcgatccagctcgataagctcaaaagagctggatttgaaattcaggtctaggcaaaattatgaatcgggctggataagcctgccttttctacgtgccttccaaaccaacaatttgtccgaaaccagtcctttttgaatcgagctcgaatggtgtgtgcaagtcgagcacggccttaatttttttaatctttgcgtgtttggatctagattttgcactttcgaagtgaaaatcgatgaagcaataataccagtgagcactaaaaatttaaatgactactgttagtgctaatgaaattttaatgtactactactagtatattaagtgcaattactgtctaactacctcatcaatactatagtaatttttcgttggccaatgtgaggcagtctgtaaaaagcgatcaccaaggaactagcagctcgtattcgcgatggaaggcgctaacttcaccccgcagcagaaggccgagctcatcaaccgggtacgtcgggtgctgccatgatgtcgctgcatcctgccacttgctcccgtgccccgttgcgcgtcctcgagcgctctgttgtgccgttagtaggccgtagctgacggtctccattgatctccactcgccgcctgcaggtccgctcggaagtgcagcagcaggcgctgcaggagctgacgcagaacttgcaggagaagtgcttcgacaagtgcatcacgcgccccaacggcaagctggacggcaagcagcagaactgcctcgctctgtgcatcaaccgctacatcgacaccatgaaggtggtctcggaggccatggcgcagcgcggctcttaggtgcgtccaccgcccaaggctccaagtctcgtggtttaagtgcacgcgcattgagaagggggtgagccgacgccttaaggttgtgctgcgtgctgtgatatccaggttgagcggattactcgtgcgttccggtgttgtcgccttcgactgaataacccgcgatgagcctgcactgtagcggtcgttgcgagacgcgtgcttatagtttctttagagggaatgccgcgcttcaatacaactcgaccctgtgcctcaattgatctactgagttctttgttctcaacgagataactgagcaaactcgagaaggatcgcggtggacctgcgtgaaaatgtaatgtatgcaggtctattggacctggggtggaagaaaagagagacgctgagatgacggggttgaactgctttgttcttgctcgttcgttgaccagagttaaatagtgagactacgaccgaccaaggcgaaggcgaggtcgaacccgcaagtaaccgactccaaaagcgacgctggccgccgtccctgctggggcttgcaagcgcgccttcctcgacagaagacgactttcatcaagctccagctctctgaacgttggctgctagacgttgacgaccgctcgcgcgatcatgacgacttggtccgcttagttcttggcgtccgtctggcgggccagctccgtgatggcctggtcgccctcgccgtggtggcggatgtagccagccagagcgtaggtgtccgactcgcccgtgaagacgccgttggcgttcacgcggccgacgttgatctgcacagaggcgtggtccttggccgcgaggatgcggttggtccacgagctgcgcgcatcgacaaagagagagagaggggagaaataccatcagcacctcgctccttcttcatttagctgctgcactgcaattcgcagtcggacgcaccacttgcgcgggatgtagatgtcgatcgactggccggcctcgttctgcatgtttggttacttgtctagagtcagatgaattcctcaatgctcaccgacttcccaaaggcgcccgttgttttggctggagctcccccaaaccaatggccctgactgtgcgttaccggtcgctcatacaaacttcaagtgaaatcgctcctcttccagcacccgtcaaaagtgatagtgcatgatgtggcgcacataggacgatacatgatccgcgagtcaatactcaagacaagacaagcgagggcggctaaaggtatcatcatggcggagcagatcacggagcagcaggtggtggccacgtacaagagtctgcgcgccgaggtgcggcagatggccgagaagatcgccgagctggaggccgagaccacggagcacgaccgcgtgatccagacgctcaacgagctgcccaaggaccgccgggcctaccgcatggtgggcggcgtgctggtggagcgcacggtgcaggaggtgcttccggccgtgacggccaaccgcgacggcatcgcgcaggtgctggcccagctcaacgacaacatcaagcagaaggagaaggccgcggacgagtggcagcggaagtacaacatccaggtgcagcagtaagaaaaaagaggctcacgggtggctgcgggtggctggccacgaggaagatagagggatggccctgcagcaagtccgtcagctctgcacactgtgcgttcgtagtccgttgaagaacacgaaggactatttatcctaccgcagcggtcgtgtgtgtcgtgtcggttgcaagttgcatcccttgctcgagttatgttacaggtgggggttggtggctggctggagacttaccaggtagatgaagttcagggcttgcttggtccctccgttaatgaatgcatgaggcgtttctgcaaggtgcgaccagggcaacaataagattcagccaactgacgtcgacagcccacatgatcgttcgttccatcatacctgcaacgccatgttgatggtcttcacttggtcgtacttggccgtcacgatcttcaacttctcgtcgaacgcggtctcttgctgctccaccacagtcttcaacgagtatatggcttggtcctgctcagcaacatcgcgttagctatcccttcgaccacctccatctaaggcactcgccacccaccttctgcttgcacgccacttcaagctccttgatccgtgtcacgagcggatcatcctctgcgtcctctttccgccgtgctctgcctctgcgggtaagctcactcttgctcttcccagtgtcccgctcactcgacgccccagcctgttggcgcagcaccaactcgtcctccgaaatcgccagcagtctctccagctccgtcagcagctcttcctgctgcgccttgtgctcgctagcctcagccaccttctcctcgcggtagaaccgctcccactgtcgcagtcgctgcatcaacaaagtattgcaatgctcagccaagttcactacatacatgcatgcagcagcactagcaccagctcaagccgcagtccgcacctgctgcagctcctcgttcctgtctcgcagctcgcgcatctgctgcgcgtcgatctgattctcgtgcagcagtccctccagctcgatcacgtgctgcacctgcaggtccatgtctcgctggtgctgcgcgaacttctcctccatggccgtgagctgctcctgcagctccacgttgtgctcgctcagcagcttccggtcgtgcgcgtacttggagatgcgcagctgcagctcgtgctcccacttgctctgctccgtcttgaacgcgtacagctgtgcgcgctgcgcctccatgcggcgctgcaggctcgtggccagctcgcgctccacctccagctcgcgagcaccccaccagtcgcgcgcctgctgcgcctcggtctgggccggtgccggcggcggcgctgcaggatccgccgacgttgacatctttttgagatggctcactactaccggaatgagcgtccttctcttggctgaagtatgcaactgtgttgaaataattgcagcagaggtatgtgaacgaatgcttgtgtcagacacaaagctggtttgagttgcatgctgctgccgggttccctcgtgccaagccctgttgccaaaccctcttgccagagacaagagggctgcacttcgtacgaagtagatgaggtttaatggcttttggtggacgaataactcgtttgttttcaacgctttgtttcctaccaaaacgcttttcaaagaatggtgaaaagcaaactttgacatcgagcactagcgtcagcgacacgtttggcagtaagatcgtcaactacatgtagtctttaatgaagtaaaatgactggggtgttcgttgcgctcgtaggtctctgtctgctcgcacgttcatgcttggtaacgtgatggctgatcagcttttcgtagtcctgccaataaagtaattacctacatttactgcgcccatgacggggccatcaaaattcaccacgtccttgaccgtcacaggatctacgctgctatcggaccgcatcaaagtgaaagtgcattgtgccggattagatatttcggaagaactgtattacactagaaaagcgaagttttggcaccagcaaattgtttccatgaagctcactcgtgtacaaatgtcatttgagcttgtcaacacgctcaagtatgatctagaagacgctataaccctgtaccatcgataatatcgactcgatataggttcatagaataataaaggaaagtggaaagacagcacaagttttacaagtaatagtaccaacttcattacgccaaccagctgtgttctaaatatacgaaagtaacagtttctcgacgtgcactgcgcactcctcctgcagccgccgcagctccagttgcagctgcgtcgtgtgcgcgtgcgcgtgctcggcgtgcgcctggggcaacttgagcgcgttcaggcgctcgatgatggcgtcgaagtccatgggaaggcagtcaagcggcgctgccgtgctgtggtcgccttgcttgtttgcagtgcagtgcgcgcttctgtactggacgcacctcaaggtacacgctcgtaaggtagaacatattagctcgtgtcgaaatcagtctactaccttacgtttgaacaaaaatacccaaatatgcttgtatttttctattcctctcacccgaaaaggagacctgtcgaaacgtctgcaaagctaaaacatcgtgattgtcgtccaaaatatgaatctcgaaacattatgtattaatacatgtagtattgtgctttgcagttgttttggcaaatcggacgtgtaaaacagctacctactaagatggggcgaggttatcggagcagattagcaggtccctcgtagggaattaggatcaagaatggctagtccgatggaagcacttgcgcaggtcctacaaacagccgaaagcccgaatgtcgcccattttcacggcattcggggtttgaggtcttacgaaggactcctaccaagtcttgtggcaggactttcatacgagctgactctaatacggtgtatgtcaaacgcagaataaacctatgaaaacacgatgcagtcgatacgttaaacactccagtcgtcgccattcgcctacgtaggactttggaggtcagttaatctgaggttggtggtctctaaatctgagatgcaaatctcggacgagtccgatgactggtctcctggagtctctccgttcaatggactccggttggagtccaagtcaagtaatctttgtttggggaagcaagcaataccggaacccgcgaaggcgaatggcgacgactggagtgtttaacgtatcgactgcatcgtgttttcataggtttattctgcgtttgacatacaccgtattagagtcagctcgtatgaaagtcctgccacaagacttggtaggagtccttcgtaagacctcaaaccccgaatgccgtgaaaatgggcgacattcgggctttcggctgtttgtaggacctgcgcaagtgcttccatcggactagccattcttgatcctaattccctacgagggacctgctaatctgctccgataacctcgccccatcttagtaggtagctgttttacaagtccgatttaccaaaacaactgaaaagcacaataaatccagctaaatcatactggcgtttacaaacaaagcatccatgcagcaggggggtaaagtaagcctaatgtactcggagtagatgtgcccccagacaacaaaattatgaattgtccttactttaatgagtaatgtactcggacttttgagtacatagtcttcatttgaacttgtacgctgcgtcaacttgcaacagctgattccactctaaagtcgctgcttgttgggatgtcattcacgaacgcaaataacgtgttacaaaccctttaagacaacttttcttttgctttctgctagatgacgcttaaattctctatttgctagctcatatccgcataagtggttcgatcagggctggcacatcgggtttaatcattaggttttaatataggttttatagtaaaacctgttagccaccaaaacagccaacagttttttcccagagtcagttgacttggaattagaaaaactagcttgaccaatctgttctattgtggtttatcaacaaatacacgacgtcctagcttctaacttcgacgcgtgttaggagggtaccagaaaacaaggtggttaacagttgctaggaaggcaagttgaagttaccttctcatagccaatcacaactgccgaatacagtatgtcgaccaatcaggttccagtatcctgggtatgaggctcgtacgtaccacagaattacacatcatagtgttcgattgaaggaacttcagttgcctatcgcgacttaaaatagataagtggggtgcgaaaacaagcggctgctcactctaaagactcccctccgcacagcaagcatgggtgaccacgaggaaaaatgcatcgcgtacatgcttgatcctcggtatgtcggatgcggaatggttcctgacacatacgatcgatatgaagatattatcgtcgactttcctgcgtctgataccagctccatcactcgtgacaccacacgaagcaaaaatatgagcgtcgaactgactgctttccaagtgtactgcaataagatgaagacgaatcaagatcgacgttatatggagctcgaagagaaggtgaaaagcgtatacgacttttgggtgacaacgggttcgcggtggccgacactcagagagctggctttgaatgtgttcagcttagtcgcttcgagtgctgcatccgagcgcacgttttcgactagaagcttcatccacaacaagcctagaaatgcgctgagtgcaccaaaaatcgaaaagcttctttacatcaaggccaaccacaactacaagcgcgaaaacggcgatagttacgagaatgaccaagaactcagtagtgaagagtagtatttgcattaaaactaggttctattggtttaaaccaagggtaaaccaaaaacctaattccatttcaaaaacttgggttcgatgcaatacttctccatatacattcctgtcgtgccttcctcagtcacaaataagctttatgtggagttactcggaagtcaatgaagtgtactcacaattaagtaataccccaaaattattacgatgaggacgcgtacaaggcgatattcacagaattgtggatgagcttgaacgtcaatttagttgtcaagtgacagagtgtgatggagctgtgcggggtagccccctcaggagggccccatttgtatgtagctccgggcgtgtcctgaaccaattatttgccgcttccactatgacgttttaaaagtaaaccagagattagcggtttcaatggtggcgatcaaggtcatttggtggccgagaggcagtggtttgactgccggtatcggctttatttgaaatgatggcagtgaaaatcgcataagtgaactcaatgtaccttacttccaaaacaaaacaaaacgaaattcccattaataaaaagaaggaaaatttcgaacatttgtgcacaaggtgatacaaggattgtagaaggatataattgcggcaggtcaacaatacatgtaactacgatagacgaacgcatcgaatcgagggtcgtttggttatgaaaacaacgagctacgccttcgtttagacacaatatttgccttcacttcaactgcatttgagacatctgaagtaccccttaagtatgacaggtccaattggcgtggtccacaccagtaccgctacttttcggttacttctccccgctagcccctcgtttgtggtcccaagctcactcgcacatcgccagccaagaccagacctccagaatgaaccgcttcgtcgccgccctccgccctctgtcgcgcgctgtcgcccgcccgcagttcgtgtcccgcgccgcccccgcgcgcttcttcagcgcgcagacgttcctggaccgcaacgaggtgagcgagcgcgtgctgggcgtcgtcaagaacttcgagaaggtggacgcggacgccgtcaaggagggcgccaagttccaggaggacctgggcctggactcgctggacgtggtggaggtcgtcatggccatggaggaggagttcaccatcgagatcccggacaacgagtcggagaagctgctcacgcccgcgcaggtcatcgactacatcgccgcccaccccatggccaagtaaatgccgtctcggagtatgctgctgttagtctgcagtgcgcgtcgcagtgctgtccaagagagctgctgctgagtctctagggtagcggcacagcctcacgtctcctcgacgccgcttcacggcgagaaagatacaggttctcgtcgcgttgggagcgccgagggaggctggtgcggcgacgcacggaaccgacacttagccttcattaacgaaaccaaaaagaaagctactttgataaagacgcgagcgtgttgagttgggttaagctgagttggggcttgacgtgcttgagggcatgttgaagcgatgggagatcgcaatgtgaggctgggaggccttcgaggcttgagccctgaccttctaagaattctacgtatgtgtagtgtggatacacttccgatgcagcagcttgcccattgcttgcttgtcgtgttcgcgtggcgagcggcagttgatcagctcacaatccgtttaacacttgaatgttggatggatccactgactgacgagctccaccgagccaaagctcgttcattacttgcattaacattgttggctaaataaatgcgctgccatcagctctacaactgcctcgccgccccataaagacagcagcaacgcattggctcgggtcagcgctacggcagcaaaatgtggaaacaggatggtgtcgtgtctgtctcctccatcgccgcgagtttacttgccctccctcttcttctccgcctgcagccgcgacaggatatcgttgatgtggttcttgacaacgggttgtcctgtagccgtgcgctggctcagcttcacgtggcgcttcttgcgctgcgtcaccttcttctcgacggtcgcgatgcgcttctgcttctcctcgcgcgcgcgctgcttctccatcttcgtgatcgccgccttcttcttcgccttgaagaacgggtcgggcttcaccacgcgcgtcttctcctctcgctcctgctgctgcttcctgtcgacacgcgcctccacctgctccgcacacgaggtcgctcatcagtatatagagcctacaaccctgcataataaaacaccacatagcgccgcacctcctccgcgtcctcgtccaccttgccgctcttgagctcgctgaagaaccggtcgtagaacgacgaaccggcggtcgcgtcgccgtcgccgcccgctgccgcgccctcctcgcgcttcttcaccttctcgtactggcgccggcgctgcgccttgtggatgatggccttcttcttgctcttcgcatcgctcttggaccgctgcgccttgcccttgatgaaccgctcgatactcaagccgctgccgcgcatggtgctcctctgtagctgctcgactcgggtcaatactcttccctggcttcccaaccaataaaaagacaaattggtgtgcgactacaccaatgtagccatttcagtgattgatgaccgaccatctacttcaacttgcctcctcattagaacgagtgcgacctggacggcgccacggtgtggtcgtcctccagctgctccagctggtaggctggcatggtcgcagtggcctgcttgcaccagcagccgcagcccgtggggcacgccgtctcgacctcgaaccattcgcgaaggtgctcggcgtggccgccatggccgcacgtcatgcaaaacatcgactggccgcgcaccacgagctggcacacggagcagcggacggcgaagtcccgacagctcgagcacacggggtcgatcgtccgctataagaagcagcacacatacatacaagaggttaaccagcagatactctagagagcatcgctctctgtcggatacgtaccgcgttgcacgagccgcagatcaagcccatggagatgccacgagggtcttgcacgccgtgagacttggtcttcagcacttcgttgcgtaggttcatagcaccgtagcgatagagaacgtctgcgtacgcctccttgtaaatgtcatagcgcgcctcgtcttcggggagcgacgatagcaggcacttctcgtcgtccacagagcggaaactcaactgcaacagcacgcggtcgtttccgttgatctcctcttctctgctggtcgtggcgagtgatgtgtgcagaggagacgacattactgggtcaactcttggagatgccgtcactgtcattgacggagccggtgacttgccattgacagcttggatcgggggctggaacgtgtctgcacttagccgaggtggtggcgcgtcctttgaggcgctcccactccacgtcttgaacggattctccagccgctcaaagtccattttccaacctgtgcttcctgttggcgctgattgcttggtctgtagatcgcggttgattgttgatgatgtgctggtagtggacaacgtatgctctcggatcgggctcgattgtcgacttgacgtggcactgttcgtgccgctgctgagcagcggccagtccttcgacgcacgtaaggcgttgtccttatcgattggcaggccctgcgagcgcgcttcactgtggctactcgaccggcgagcactcctcatcacaggcggagcgtcgcttgaatcggctaatgtcagttgcgtgagagcattcgatgacaagcgtctgggacgcaagccgccgctgcttgctgtacttcccgtcacactgctccccacgccagttgccacctcctcgatgcttgcgcgccggtcctcacgcaccactgggagctgatcttccattgtaattgctgagggtgtcatcgagtcgcgaatctcatccgggtccttgcgctcgttcggcttcaaggcacacacgatcgacgccagcgcttgaacgtcgcctgcctgctcgtacatgtccagcactttgtgtaccaggctcttcccaagcgggtgtgcactccaaggatgcgaggttcgcagacacagcgacgtcgaagagctggtgctcttcttgtagataggcagctctacctcaggagctgctgagatctctaataacgaccaaatctgctgcaagtcgcttcggccggccagcagcgcagtccgagcgttttgagcgcacgttgcagctagtgcggtacaagattcgtcgaacgcggggtcatcgtcttcgtgttggctcttggttgctgcctcgctgtcggccagtataccctgcaatactcgagtcaggttgttgttctttgatgaaactccacgtttgccaggcatgtcttctgccgcacgcaacatccacgatatcatcgaccggtttacggatccaagctgctccttcttccgcttggttgatttgctggctttaggcgatactgtcggcggcgccacagggcgaggcgaaatatctgtctggtacgtcaagatggacgacacgccgcacagcttggacagatccaggatagtcacgctgatgctaagatccaggttgagagcaggcgcaggttgctccacacgcttcattcgctctgcagtatttgcgcgcatggatgctcgaggggagagttggaggccagccgtagtgctcgtcggcatggagagtaaatgctctgggttattcacgggtaaatgatactcggcactcgaaaagtacgtattcaggtactcagaacctccgtgaattgagggctccatctcgttcactccagccaacatgtcgtcgtttccacctgcaccgccacttccagatgaataatacatggatgcgtgacgataaccatgcgcggatacagagtgatcatcgtctccaaacacacccaccacgacgccaccatcgatcagttcctgagattgttgctgctgtcctgcccagtcattggcgccaacgtccatagatcccatgatattggctgacgatagcagcttcactggcggcttcttgttcttcttggtcgcgaatcgagagtctctcagatccagcaactcctcgtaagtcctcggtagcttattcggaggtggctgcggcttgcttcccttgccagcagcgactgccgtgggaacaacagctgagctcctcgattgtccgatggccacgcgtgaatcaaacaccagcagtatgttaggaccactaaaggcagctccagagatacgtggacacggcagtgctcttgcaccactagaacttgcagctcgctctttcgtactcgcggaatcatcggagcgggcatcctccttatctccagtccctgaaactggcgcatcctcttcaccactggcaggctgaggttgagtctcgccgcccttgatcagctcctcctcaagcgcaagaagagcctggagcgagctgtcgttaccctccaacgtgtactcgtccgtgcccagcggcactgcagactttggcaccacgagcggcacaaagtcggttttcagcgccgatagactgtacttcgagtgctgcgcgtgcatctcggcaaactcggtacgaagcatacgtcgggcgtccgtgtgctggcgggcgctagtgttattaccttccgatggcgccacatccgccaaatacgatgctgtgtcatagccgcacgcttcaagctgcgggacgtccaggtgccacatacgaagttcctgatctttcgaccacgacacgagctggtacacgctggtctggggacgaacgcgccacgccataccgcgcaccaaatcactatgacccgcaaacgagtgcaccagctccgccgtgacggaagatcctgcgttggtgccagacacattcacatctcccgcatcttcgttgccgccgctgtccccgtcaccatgcgaaagagcccataggcggatcgtattgtccatccgctgcgaagaaatcgtcacgagtccatcgccaaacggcgtgtactgcgctctccacactggcgcgccggtattcagcgttccttggcacactctcggctgcgtcacgtcccaaaacttgaccgtcttatcgtccgagcacgtcagcaactcgtacatccgctgcggatgccagtcgagcccatagatcttctgcatgtgggccgtgatctgcgccgccggggccaccgtcttctctccagcagctcgcaggtcccagacgcgcacttctccgtcatgggcagtggctagcgacgtggcatccacgcggttccactccacctggatcacgctcgtgttgaaggcgttcagcgtctgtacgggcctctggggcgacctcatatcccacagcagcgtcttggcgtctgctgagcaagtcgccagcagcgacggctccatgggggaccaggccacgtcactcacgggtctcgtgtgggctctcaatgtggccaccagcggctgcgtggtgctctgcgagccactgccacctgcgcctcctgctccgctgctgtggccgtgtttgtagacgctggaggagccctgacccgccccaatggacgccgaagcgcccgagccaactcccacgtcggcgatgtcccagatgagagtgttcctgttgctggacgacgctacgtggctcttaaaaagcgcgtgcgggttgcacttgaccaccgtcacctcgagcttcgtctggtggtgcagcgtggccggcggcaggaacggcgcctccaggtccacgaggtgcagacccttgcggcccgccagcacggctacagcgcccgtggcgtccacgctcaacgcgctggcgttcaggtccaggtgcacgttgacattcccgtggatcgtggagccccccgaagccgagacagagctgcccgacgcagcggacgcgctggacgtcgcgtttgtcgtaccggacacgcctgcggacacggagtgcgcgccgcgttccccgtcccgcgcgctggtggcgccgcgagaggcatgatagctgcggtgccgtcggcgcatattgctgggctccggtgaaaattgggcgtgctgctattgcgaattttgtaattggtttcaatgtaaatgtctggaaaaggccagctgcaacttttcggataaacgaccaacttcaactttcgctagaccatgacaaggttccaacgatccgtggtgcgcgtaactcagaccatcaggagtacgggaatgcctttaagtactgtgttgtcaacctcgtactacgaacaaacacacccactaagctcatctaaggcccgcttttctctactttgcgatgtggttctcaaaatgcagacgcaaagacgccgtctaagctgctcgagtgtcctcttaacacgaccctcgaactactgcatcgacgccgacgcttgcaggtactgcgctataaacagagtagtgggtggcgtcaatgaacgagttcatcgcttcaggcaccgacggctgtctttcagaagaggacggcgagtgaggcgcctctgctgcgctgaagcattccgttcagtgcggacacgtgaagcatgcattccgagcgtatagttaactcaatagcaaaggtcgctggatcttttcttgaagcacacctgcgacaaaagacaaatggttggctcgccgtgggccgagctcgaggagctactgataccatattcatcctggtgatcgcgaatcttggtaccgtattgccaggcagcgcggcgtcgaaagaatgtaagcattacttgctgccagcccggtgagaatatggtatgcttgggatctttggtttgccacgagccaaggagaggagaagagcatggcctgcctgatgcatgtacagtagggttgacagccaaagcgtagccactcagagcatcaccccgatccgtttcgttccggcggtgccttgagtgggagacgcacaaactgcagccgacgccaagtcagaacttacgagcccgacgccgaatttatttcgaacttatttcgtggaaccgcattgttgaagttgcgtgctatagccgtgcgaacatggctctcgagttgaagatggctacacgagttatcggttattatattatctttttcaaaaaatgaagaaattattaaacattttagtattctaatatcgataaatttcaaaatgatttaaactttttaaaacaattactaaaaatacacaaaatacacaaattcacccatattatagggagtattttttttaaatcttgtttttttgatgatttagttgaccattgttttaaaagattaccattataggccttaccacttggctatacttcaaagtaaataaaatgtatgcttagtttcatcattaggtgtttacggtattattattggtggttggtcaagtaattctaaatatttgttgttaggtgcattaagatcaactgcacaaatgatttttgctgtactatttttgatttttttgctaagtaaccgtttgatatttgaaaattatatttaactgttggtactacagattatcaaatattatattatagtaattttaatttttcatatgaaaaaatatatttttttagtttttttttatcatttgctgttaaagttccaatgttaccgtttcatgtttggttaccagaagctcatatgaaacttggctaataataccaaatgctggtaaaattaaaatataaactttagggtgaccaaaaaaccaaaataaatgttaataaatttagctactcggcgatgcctttcaacaaccgatacaccagagatttacccttctcggtcctctcgtaagcattatttaaattaataggtttcatagaaaaaataaaacccaaaacggaaataaccggagttgctggatcttgaaaacctaattgccaaggttcggccatatctaaaaacataatggtaaaagcttgcttgactgtaagatagacatatcaaacagggacgaaagtcggtcatagtgatccgataattctttgtggaaagattatcgctcaacggatatattgtacgacactttcattatgtattatctatgggtgctgtttttggtatatttactggattttatttttggattggtgtaacatagaaacccttggatttacggtgataacgatttatattcgttattttttgtaaagtaaataataatggtgtttcaaattttaaagaaccacccattatgtttaatacctgttatttatgcttcattaacagctattcgtcaaacagatttaaaacgtattattgttaattcttaataggttttaagggtggttccccaatattcaaaaaagattacacatgttaaaacaaggcttaaatatacctttatctgttgaagatcagattgtaattatttatttaggtgtttagaaagaaaaaagacacataaaaaatttataaataatattgataatatgcttcaagaatttttttaaatgttttaactgaaccatgaactgggtatgagagagggatcggcccacttggcggcgcccctgtcgaggccttctcattctccaatatcctgcctcgccagcaagcctccccacccagcacccgcccaggctccctccccatccagccacggctccgtccgtccgccgcctcgtggccctgttcgagtcccgcgccgccgtccgcaccgcgacacgcgcctccgcagccgcagcgaccagcaggacgagggtctccaccctcatcgagtcctacagcgcctcgtcgaccatcgcgtccagctccgtcgaggcgaccgacgtcgtaggctcctccgcggtcgcagcagtggagacgctcgacccccgctggtccatccagctcctcgacgcggcgaggtttgccgagttccagtacggctactccggtttcgaagctccagccgtcgacgaccaagaccaagaccaaggccaaggcttcacggcgctggagccgactgaagagctccacgaagtcactgctgccgccgccgacgacggagacgacgaagactgcctccagcaagcgcctcctgctgagctgcccgtcggccctgtcgacgatgccgacgtcaagagctatagccagctcctgcaggaggccgacgacctcctcgaccgcgtccacgacgcggctgctgctgacgctgcgcctgcagtcgttgagcccaagccttcggagacccagccgcacgtccgagctgctgcagctccgcaagctaccaagtcccgcctgttggacttcaagcagagcgcggcgtttgtcgggcagtgcgcgcaggcaaggcggcggcgcagcgcggcagcagcgaagccccaacgtccgctctggaagctctgagcgacgttactcccgaacgacatgcatgtgaactgtgtacagtagtagtagtagtgcgtgcatttccagacccaggtttgcagtcgacctctgctgcttgacggacgtggtctaggctgcacctcattacgtgcgcgcctgagaccttcctgttcatcgagcggcggggtcgatggtcgagttttcggccgatcgattgcatcccgtgcctgagctgcacctcatcacgtgctggcttacactgctgcgaccgtggaggaacgtacgacgtcggtcgtctcgacggagctggacgcgatggtcgacgaggcgctgtagaactcgatgagggtggagaccctcgtcctgctggtcgctgtggctgcggaggcgcgtgtcgcggtgcggacggcggcgcgggactcgaacagggccacgaggcggcggacggacggagccgtggctggatggggagggagcctgggcgggtgctgggtggggaggcttgctggcgaggcaggatattggagaatgagaaggcctcgacaggggcgccgccaagtgggccgatccctctctcataccactgctgcgacagcatggttcagttcatggttcagttcaactcgtgtagccatcttcaactcgagagccacgttcgcacggctatagcacgcaacttcaacaatgcggttccacgaaataagttcgaaataaattcggcgtcgggctcgtaagttctgacttggcgtcggctgcagtttgtgcgtctcccactcaaggcaccgccggaacgaaacggatcggggtgatgctctgagtggctacgctttggctgtcaaccctactgtacatgcatcaggcaggccatgctcttctcctctccttggctcgtggcaaaccaaagatcccaagcataccatattctcaccgggctggcagcaagtaatgcttacattctttcgacgccgcgctgcctggcaatacggtaccaagattcgcgatcaccaggatgaatatggtatcagtagctcctcgagctcggcccacggcgagccaaccatttgtcttttgtcgcaggtgtgcttcaagaaaagatccagcgacctttgctattgagttaactatacgctcggaatgcatccgcactgaacggaatgcttcagcgcagcagaggcgcctcactcgccgtcctcttctgaaagacagccgtcggtgcctgaagcgatgaactcgttcattgacgccacccactactctgtttatagcgcagtacctgcaagcgtcggcgtcgatgcagtagttcgagggtcgtgttaagaggacactcgagcagcttagacggcgtctttgcgtctgcattttgagaaccacatcgcaaagtagagaaaagcgggccttagatgagcttagtgggtgtgtttgttcgtagtacgagcttggcagtactgtgcttgaaggcatccacgcagtgttaatggtctcaattccatgcatcacgtatcgctggaacctgtaggctctgccgtctaacgaaaagttgaagttggcctcatatccgaaaagttgaagttggccttttcccgaaaattacattacacaaaattcgcaatagtagcatgccaagctcagcaataatgggcggacggcaccgcagctagcacgactctcgcggcgtcagcagcgcgcaggacgcgggccatggcgcgcactccgtgtccgcaggcgcgtccggtacgacagacgcgtccgctgcgtcgggcggctctgtgtcgacgctggggcctccacgatccacgggaacgtcaacgtgcacctggacctgaacacgaacgcgctgagcgtggacagctgcaccaccagacggagatcgaggtgacagtggccaagtgcgacccgcacgcgctgttcaagagccacgcggcgccgtccagcaaccggaacacgctcctctgggacattggcgacgtgggggcgggctggaagcctcgagttgccccagcgcgttggccggtgacccccacaaagctcctacgattcgtgacggcgtcgagtgttggtgctgctgctgcccgcgtgggagaaggtgttcgtgtcgggtggcgctgagttgttccaccgcctggctggcggccagcaccgcggttgcattgtggactggactccagatcttcccgccgtttgctcgcccaggatgctgcgtcgctcggggagtgcggtcaatctgcagacacgaactcgtcgccgttgtggtggcctccgctccgtggggtggtgccgaagctgctgaagagtctcacagtagcggcgacggcggcgacgtgggcacgggataccgcgacagcgccaccttgtcctcagaagacttggcggaggagcacgaagctgctccaccagcgctgcgaagtcgtcctggagctgtgtgttcactccagcaaggtctgtgtgctcttcggtctggccgccgacagcgtccatcacgtccgctgagagatcagcaacctccgtgttccacgaccagagtttctcgggaaggaagctgaagttcaccagagactgtgaaaggcagcttgatcacggcgtcatgatactgggtcgacggaaccaggctgctggattccggtctttcgtcgttgagtccgtttgcgcttgggcagcgtacgctggccaaaaagaagaagaacaagaacttcgagcggctatcggcggcgccacccgccctacacaaccttctcaatcagatgcaggagtcgctggcaactctggatacccgcgataccgggctgcagttcccatcggacaaggtctcgcaggcttcgtcttcgccatgaagccaggtgctaccgaaggcacaagtggacgtggccaaggcgtacgagtcacttcaaaagagactggtagagctgctcggcaagcgctgtgccagcattcgcgctattttacagagaaccagttcgaattggggctctagcgttggaaaccagtgtgtttagacacaggaggaggcaggacaaggtcaaatacatgcgctcgtttgcttctcagcagttcatggccattagaaagataccaaaagcagttcatgttgcgatataaggagtaaacaaacaaattggtggtatcatgaggacgttagttaatttatgtggatccaggtctgcgcgtcaagcctcgagtcctctcgaaggctgatcctgcaccctaagccagcacgtgatgaggtgcagctcaggcgcgggatgcaatcgatcggccgaaaacttgaccatcgaccccgccgctcgatgaacaggaaggtctcaggcgcgcacgtaatgaggtgcagcctagaccacgtccgtcaagcagcagaggtcgactgcaaacctgggtctggaaatgcacgcactactactactactgtacacagttcacatgcatgtcgttcgggagtaacgtcgctcagagcttccagagcggacgttggggcttcgctgctgccgcgctgcgccgccgccttgcctgcgcgcactgcccgacaaacgccgcgctctgcttgaagtccaacaggcgggacttggtagcttgcggagctgcagcagctcggacgtgcggctgggtctccgaaggcttgggctcaacgactgcaggcgcagcgtcagcagcagccgcgtcgtggacgcggtcgaggaggtcgtcggcctcctgcaggagctggctgtagctcttgacgtcggcatcgtcgacagggccgacgggcagctcagcaggaggcgcttgctggaggcagtcttcgtcgtcttcgtcgtcggcggcggcagcagtgacttcgtggagctcttcagtcggctccagcgccgtgaagccttggccttggtcttggtcttggtcgtcgacggctggagcttcgaaaccggagtagccgtactggaactcggcaaacctcgccgcgtcgaggagctggatggaccagcgggggtcgagcgtctccactgctgcgaccgcggaggagcgtgcgacgtcggtcgcctcgacggagctggacgcgatggtcgacgaggcgctgtaggactcgatgagggtggagaccctcgtcctgctggtcgctgcggctgcggaggcgcgtgtcgcggtgcggacggcggcgcgggactcgaacagggccacgaggcggcggacggacggagccatggctggatggggagggagcctgggcgggtgctgggtggggaggcttgctggcgaggcaggatattggagaatgagaaggcctcgacaggggcgccgccaagtgggccgatccctctctcataccactgctgcgacagcatggttcagttcatggttcagttcaactcgtgtagccatcttcaactcgagagccacgttcgcacggctatagcacgcaacttcaacaatgcggttccacgaaataagttcgaaataaattcggcgtcgggctcgtaagttctgacttggcgtcggctgcagtttgtgcgtctcccactcaaggcaccgccggaacgaaacggatcggggtgatgctctgagtggctacgctttggctgtcaaccctactgtacatgcatcaggcaggccatgctcttctcctctccttggctcgtggcaaaccaaagatcccaagcataccatattctcaccgggctggcagcaagtaatgcttacattctttcgacgccgcgctgcctggcaatacggtaccaagattcgcgatcaccaggatgaatatggtatcagtagctcctcgagctcggcccacggcgagccaaccatttgtcttttgtcgcaggtgtgcttcaagaaaagatccagcgacctttgctattgagttaactatacgctcggaatgcatgcttcacgtgtccgcactgaacggaatgcttcagcgcagcagaggcgcctcactcgccgtcctcttctgaaagacagccgtcggtgcctgaagcgatgaactcgttcattgacgccacccactactctgtttatagcgcagtacctgcaagcgtcggcgtcgatgcagtagttcgagggtcgtgttaagaggacactcgagcagcttagacggcgtctttgcgtctgcattttgagaaccacatcgcaaagtagagaaaagcgggccttagatgagcttagtgggtgtgtttgttcgtagtacgagcttggcagtactgtgcttgaaggcatccacgcagtgttaatggtctcaattccatgcatcacgtatcgctggaacctgtaggctctgccgtctaacgaaaagttgaagttggcctcatatccgaaaagttgaagttggccttttcccgaaaattacattacacaaaattcgcaatagtagcatgccaagctcagcaataatgggcggacggcaccgcagctagcacgactctcgcggcgtcagcagcgcgcaggacgcgggccatggcgcgcactccgtgtccgcaggcgcgtccggtacgacagacgcgtccgctgcgtcgggcggctctgtgtcgacgctggggcctccacgatccacgggaacgtcaacgtgcacctggacctgaacacgaacgcgctgagcgtggacagctgcaccaccagacggagatcgaggtgacagtggccaagtgcgacccgcacgcgctgttcaagagccacgcggcgccgtccagcaaccggaacacgctcctctgggacattggcgacgtgggggcgggctggaagcctcgagttgccccagcgcgttggccggtgacccccacaaagctcctacgattcgtgacggcgtcgagtgttggtgctgctgctgcccgcgtgggagaaggtgttcgtgtcgggtggcgctgagttgttccaccgcctggctggcggccagcaccgcggttgcattgtggactggactccagatcttcccgccgtttgctcgcccaggatgctgcgtcgctcggggagtgcggtcaatctgcagacacgaactcgtcgccgttgtggtggcctccgctccgtggggtggtgccgaagctgctgaagagtctcacagtagcggcgacggcggcgacgtgggcacgggataccgcgacagcgccaccttgtcctcagaagacttggcggaggagcacgaagctgctccaccagcgctgtgaagtcgtcctggagctgtgtgttcactccagcaaggtctgtgtgctcttcggtctggccgccgacagcgtccatcacgtccgctgagagatcagcaacctccgtgttccacgaccagagtttctcgggaaggaagctgaagttcaccagagactgtgaaaggcagcttggtcacggcgtcatgatactgggtcgacggaaccaggctgctggattccggtctgtcgtcactgagtccatcgacgcttgctcagcgtgcgctggccaaggagaagaagaacaagaagtgcgagcagctatcggcggcgccacccgccctacacaaccttctcaatcagatgcaggagtcgctggcaactctggatacccgcgataccgggctgcagtccaccggattgcacggaacctgctcgacgagcggaggacacggcaacccgctgtctggctggcacgtgtcttcacgggagcgagtcttgatcgtgcccaggatcttgaacgcactccaggcccccaccgcgcagtccacggggacgcaagcctgaacttccaccagcgacggacacgccaagccgccgtacagcgggaacgtctgcactgttctcgcccgggacttgaccttgagcaggcacgtgctccacggcgtccagtcactcacgacgcagttgatggggtcgcacggtacgctctgggagagcgcggggcaggcggcgcctccgtcctgcggccggaccgtgaccacccgcgagcgcgtcttccagcccgtgaaagggttgcacgtgtaggcgctccagggtccgacctggcagtcgacgcgcacgcagggctgcgactcctccagtgcagggcacggcgccccgccgaacagcggccagaccacgacgttgcggcgccgggtcttgaccgtggagtaggcggcggagcagccgctgaagtcgccccagggcccgacttggcagtcgatcggcggcacgagccaccactcgggctcggccgagacaccgagcaatacggtggcgactaccgccagcgggaggaagagccggatggggctcgaaagcattggcgcgcacgtggaaacgacgctacgcaggacttggacgaccttctactcgggacgagaagtggcgaatcgatgcagacgatggaaagcatcgacaagagagagagagaagatcttggctggctgtgtggccgccgtccgtcgcgggttgatatccatgggggagagatatcccgcctggaacagtcgctggaccaagagccgcgatcttcactgacagcccaaacaattgctggtgtggagtatcaactctaaattcggccttaaattcggatcacatggtacaccgagccatacggatcgggaagcgttttgttgccatggtacagcgtggcgagtgtacgcgtgcacttgaacgcatttagccagctattttgctaccagcgctttcgacgcaagggacgaggccgtgtacgtactcgtgcaaatattgcacacttttgcactgcaaaaatgtacggaacgcgggactcgaacccgcaacccccagattcgaagtttgatacgctttcaattgcgccagccgcgcttccgtcaccaacaaaacgcaagttaaataaataaagtaacaattagtagttgttacctacagaaattgagagtaccataaaaataaaaaatcaattaaaacttttctttttactgccagtgcggttatcgcgcattggtgacaattcggtttgacttggtcctatgtcgaaagcgctgttagaggcgattgcttgcacttgcgatgtcttcttaaaattgctgcacaacagcaactttgctatgttatcgcgaaaacgttatcaccaataagtagtatctaacctcacttcggcttcatcgatccggaggggtcctcgaaaatgtgtacactcgcggtcagtaccggtaccgtacgtcatacacgtagcgatacgcgggcctcgtatctgcaccgccacgacctgcgagcgagtcttccaaattgggatctagtccgagagtggattgcagagtactttaggcagttttggaagctgactggcaatcggtgcgtacttggtagccaaatgcactctcaaaattactttttcctgcagtattctgataacgagtacagctttcgaatcgtgtgtaggggcaactacacgatcccgatcttgtgttctaggatcgtgtcgttctgataccagccccgctctagattcttctcgaagttgacgtcgttgaaggggacgggggttaccacaccgaagtccgcagtctccaaagccttgcgcgcttggtccgtcagctgcgaccaatggacgaggtcttgaaagtcacccgcatccaacgacacatcaattgtgtgatacccgcccacataaaagcccatgaagtactccatcttggggtgggtgccgttcataaactccttcacggtaggaggataggccacgtattcggcgtcttcccgggaggcagagactccgagaagcgacggattctccagcgccgggttgttaagccagacgatggtgttgatccagtcatggcggacgggtgggtagctcgcctcataccaactgatgtctctggggaagtaccaagcgtacatgatggcccaaacgtcgcggtaccacccagatcggctgtacacttgcgagcccaataccgatcccctgcagccgtgaccgtacgggtttttctctaccgttcctccgtcgggcgccattgggtccattccgccgctcgtgtcgccggccgcattcacagcagcgtaagagcggcagccgtccttgatggccaggctgggcttgtacttgatagcagccttctcggaaatcgttttgggctcgagctcagggaacggctggaccttgtcatagtcaatgacagcagcttgggctgcaacaagagcagagagcgcgatagcaaagggtagtccgagcttcatcgcgactggagggacgggtagttgcgtgctcttcgtcgaaaatctagaactgacagaagatgtattgtggcgactccagcccttattgagcggatcttgccaacgatacggtacatccaccatccagctttgcatatcttcccgtcaagattactctacagagccggttgcatatgtacatgtgtacagtaacaagtttaacccctccagaccgggagccgaaaagaacatgtaaactgcataccgtatgcagcgtaattagacttgatgtttgtattcaaaaatggttagggaagataggattcacgatggaggccaacaaggccgtgctggctccagtgtggcatacccatgctgaataatgctacttaccacggatagtgacaggatgcccgccgaacagaaactagggccctagcgagtcccgattttaaaaaaatcgtaatttgaaacttcccatacaaaaacttatatacaaagtaggtgtcacctctaggcgttctgtaaacatgtggcacgtccggaggcattctatgcactaccgtatacaaacataaaatgaaatagacatccagaaaaatatccagggggtaatcaaatgaaacgttaccattgtgtacataagacaatacctaagatgcaagttaggatgtgtcattgcagacagaagcatgtcattctgtagtagaagcaacaaagcagcgaggattaccaagtttgatcactaagtcaaatttcactgacttcaacaccgaagtagttagttgcctggacccttcccaactaacaacacacactaaagcgctacacctgcattcatgcttgaggtggatgtagtttaccacatggtttctccatgggtgcaagaagttctacagttgaatacttcaattagctgctgctttgattgatagatgccaaaaccatgcctttgccaatccagtcaacaggaaagcagcgattacaagccgtttcgctaattggagcatacaaaggcaaagttgcatctacaactatgtgtgtgggtatccaaagcctcgctatactgggaaccgcatcgactgcaattgcatttatccaaatcgcttatattagtttgctaacgttcacgttactacctctcgcccttatcattagcagcgccagccatgccaggtgtcggctcgtttgcccatcggtcatacaatgaacaccaaagcggcatctccggcttggccggaattcgtctcggctcgttcttttcgctactacctcattcgagtcgtcgccttcactcaggccggctcgttttcgggctgatcatgactgcttggtcgccgtagtctccttcaacagcatcaatattaatctggttagctcatgtaggctacgatacaacatcagtctaataaactgcatgcaatgcagtatacaggacaacatgatatacaccacaccattgttcggagcacgccataccgcatcagctcctgccgtcgtcttcgccgcttacatcaacgcggaaagatgtcggaatccttgagcgcgggaatcctgcgtgggcctctcccccaggccttcgaacgccaggtacgaatgcagcgggttgagcagtgcgaccgagcccaacagcttgactgtgtacgacagcttgtacagctgcagcagcagacgcttgcctgtaagcagcaaaaacaactggtgaggcgaggccgatgaaacctttgtcgcccagggggttcgcatagcgcagcccaagactgttccccaggggtagacccagagaatcgacttgagagtcaacagcaagaagatagacccagagattcgcagccgcaaagctttaaaccctgagaatcacactccttggttggcgtgggcaccttgtgtaatccctgtcggctcgtttgtcttcgacggaacggcactccaccggttaaaaatgtaacctcgaagaaatgcgggggcgcacgtctacttcagaacgcacctccacaccaaaaagcaaacccagagaatcagatctcctgaaacccagaatatcacgaattcagggtccaggatttcagtcaactctgggacttggaactcagaagacaccttacccaaatgccctcctagctcgataaaacgaacaaatacagagtatacaaacactacaactagccgtcacttattcttttggacccttggacggtgggtcacacacactaggttcactcgagtctgaaattcaggtgcctagctcccctgagactcacacgaacgcgcaccacctccaataaaagaggaaaatacaatcactatcagttaccttcccttcacacaagcagtcaatacaaaatcctggaggcgactacctagcaccccagaataccctctggaataatatgaaatgggctaccacgagcacagcaagtgacccaactaggatatggaatagatggatcaccccaggaagctcaaggccgtcgctggtcacgacctcactggacttgagtttgatggagcccacacagacggctgtctttcgccgttgatatgcccttagcgtcccgcggtcgtagtctcgggtcctccggatttcagtcggcaggcttgttagaagtcacttacgcagtacagggtaaaaggaactctgtttggtttttatcagctacttctctctctctctcttcttcgggcaaatatcttctgttcactatgcttggggtcaaaatgtcttgtcttgagtataccttgggatcagcggtccaaacttgcgatcggcttgcgaatccattgtcgcacggcgtcggaagtgccaattgtgggtccttagacttggtttagtatggttcaggactccctctcgactcctcgaaagtatccagtctgtgcttccatgacggttcttcaaggtcacgcatcattttgattgcagactggcttcaaactggctcgaatccctgaaaaccaggtgacactcagggtcatcctctgaaatcctgggaattctgaggaatcttggggaactgtggggattcttgggtgttggctcgggaaacacttcagttcagtatagagggtctggatgtatggcccaaacccagagaatcatctttggaactctgggtcacctgcactcagggaggtgaactctgggtcatcgtgcggcactctaggtttccgtgcgacactctgggtaacaagtctgctgcagtgcggactcgtgtgtatctcctcaaagccacactttcagtgggtttagcagcctcctgcgcatgatcatggtagtagtgggttcattctcatggtaatttgatcctctggagcactctgagccacggcaagatgaggcgtacaccgggatacattctccagagacactttccgccagactttaggcactcatcgtaagggaagtcgacctctgctgcttgacggacgtggtctaggctgcacctcattacgtgcgcgcctgagaccttcctgttcatcgagcggcggggtcgatggtcaagttttcggccgatcgattgcatcccgcgcctgagctgcacctcatcacgtgctggcttagggtgcaggatcagccttcgagaggactcgaggcttgacgcgcagacctggatccacataaattaactaacgtcctcatgataccaccaatttgtttgtgtactccttatatcgcaacatgaactgcttttggtatctttctaatggccatgaactgctgagaagcaaacgagcgcatgtatttgaccttgtcctgcctcctcctgtgtctaaacacactggtttccaacgctagagccccaattcgaactggttctctgtaaaatagcgcgaatgctggcacagcgcttgccgagcagctctaccagtctcttttgaagtgactcgtacgccttggccacgtccacttgtgccttcggtagcacctggcttcatggcgaagacgaagcctgcgagaccttgtccgatgggaactgcagcccggtatcgcgggtatccagagttgccagcgactcctgcatctgattgagaaggttgtgtagggcgggtggcgccgccgatagctgctcgcacttcttgttcttcttctccttggccagcgcacgctgagcaagcgtcgatggactcagtgacgacagaccggaatccagcagcctggttccgtcgacccagtatcatgacgccgtgaccaagctgcctttcacagtctctggtgaacttcagcttccttcccgagaaactctggtcgtggaacacggaggttgctgatctctcagcggacgtgatggacgctgtcggcggccagaccgaagagcacacagaccttgctggagtgaacacacagctccaggacgacttcacagcgctggtggagcagcttcgtgctcctccgccaagtcttctgaggacaaggtggcgctgtcgcggtatcccgtgcccacgtcgccgccgtcgccgctactgtgagactcttcagcagcttcggcaccaccccacggagcggaggccaccacaacggcgacgagttcgtgtctgcagattgaccgcactccccgagcgacgcagcatcctgggcgagcaaacggcgggaagatctggagtccagtccacaatgcaaccgcggtgctggccgccagccaggcggtggaacaactcagcgccacccgacacgaacaccttctcccacgcgggcagcagcagcaccaacactcgacgccgtcacgaatcgtaggagctttgtgggggtcaccggccaacgcgctggggcaactcgaggcttccagcccgcccccacgtcgccaatgtcccagaggagcgtgttccggttgctggacggcgccgcgtggctcttgaacagcgcgtgcgggtcgcacttggccactgtcacctcgatctccgtctggtggtgcagctgtccacgctcagcgcgttcgtgttcaggtccaggtgcacgttgacgttcccgtggatcgtggaggccccagcgtcgacacagagccgcccgacgcagcggacgcgtctgtcgtaccggacgcgcctgcggacacggagtgcgcgccatggcccgcgtcctgcgcgctgctgacgccgcgagagtcgtgctagctgcggtgccgtccgcccattattgctgagcttggcatgctactattgcgaattttgtgtaatgtaattttcgggaaaaggccaacttcaacttttcggatatgaggccaacttcaacttttcgttagacggcagagcctacaggttccagcgatacgtgatgcatggaattgagaccattaacactgcgtggatgccttcaagcacagtactgccaagctcgtactacgaacaaacacacccactaagctcatctaaggcccgcttttctctactttgcgatgtggttctcaaaatgcagacgcaaagacgccgtctaagctgctcgagtgtcctcttaacacgaccctcgaactactgcatcgacgccgacgcttgcaggtactgcgctataaacagagtagtgggtggcgtcaatgaacgagttcatcgcttcaggcaccgacggctgtctttcagaagaggacggcgagtgaggcgcctctgctgcgctgaagcattccgttcagtgcggacacgtgaagcatgcattccgagcgtatagttaactcaatagcaaaggtcgctggatcttttcttgaagcacacctgcgacaaaagacaaatggttggctcgccgtgggccgagctcgaggagctactgataccatattcatcctggtgatcgcgaatcttggtaccgtattgccaggcagcgcggcgtcgaaagaatgtaagcattacttgctgccagcccggtgagaatatggtatgcttgggatctttggtttgccacgagccaaggagaggagaagagcatggtctgcctgatgcatgtacagtagggttgacagccaaagcgtagccactcagagcatcaccccgatccgtttcgttccggcggtgccttgagtgggagacgcacaaactgcagccgacgccaagtcagaacttacgagcccgacgccgaatttatttcgaacttatttcgtggaaccgcattgttgaagttgcgtgctatagccgtgcgaacgtggctctcgagttgaagatggctacacgagttgaactgaaccatgaactgaaccatgctgtcgcagcagtggtatgagagagggatcggcccacttggcggcgcccctgtcgaggccttctcattctccgcctcgccagcaagcctccccacccagcacccgcccaggctccctccccatccagccatggctccgtccgtccgccgcctcgtggccctgttcgagtcccgcgccgccgtccgcaccgcgacacgcgcctccgcagccgcagcgaccagcaggacgagggtctccaccctcatcgagtcctacagcgcctcgtcgaccatcgcgtccagctccgtcgaggcgaccgacgtcgcacgctcctccgcggtcgcagcagtggagacgctcgacccccgctggtccatccagctcctcgacgcggcgaggtttgccgagttccagtacggctactccggtttcgaagctccagccgtcgacgaccaagaccaagaccaaggccaaggcttcacggcgctggagccgactgaagagctccacgaagtcactgctgccgccgccgacgacgaagacgacgaagactgcctccaacaagcgcctcctgctgagctgcccgtcggccctgtcgacgacgccgacgtcaagagctacagccagctcctgcaggaggccgacgacctcctcgaccgcgtccacgacgcggctgctgctgacgctgcgcctgcagtcgttgagcccaagccttcggagacccagccgcacgtccgagctgctgcagctccgcaagctaccaagtcccgcctgttggacttcaagcagagcgcggcgtttgtcgggcagtgcgcgcaggcaaggcggcggcgcagcgcggcagcagcgaagccccaacgtccgctctggaagctctgagcgacgttactcccgaacgacatgcatgtgaactgtgtacagtagtagtagtagtgcgtgcatttccagacccaggtttgcagtcgacctctgctgcttgacggacgtggtctaggctgcacctcattacgtgcgcgcctgagaccttcctgttcatcgagcggcggggtcgatggtcaagttttcggccgatcgattgcatcccgcgcctgagctgcacctcatcacgtgctggcttagggtgcaggatcagccttcgagaggactcgaggcttgacgcgcagacctggatccacataaattaactaacgtcctcatgataccaccaatttgtttgtttactccttatatcgcaacatgaactgcttttggtatctttctaatggccatgaactgctgagaagcaaacgagcgcatgtatttgaccttgtcctgcctcctcctgtgtttaaacacactggtttccaacgctagagccccaattcgaactggttctctgtaaaatagcgcgaatgctggcacagcgcttgccgagcagctctaccagtctcttttgaagtgactcgtacgccttggccacgtccacttgtgccttcggtagcacctggcttcatggcgaagacgaagcctgcgagaccttgtccgatgggaactgcagcccggtatcgcgggtatccagagttgccagcgactcctgcatctgattgagaaggttgtgtagggcgggtggcgccgccgatagccgctcgaagttcttgttcttcttctctttggccagcgtacgctgcccaagcgcaaacggactcaacgacgaaagaccggaatccagcagcctggttccgtcgacccagtatcatgacgccgtgatcaagctgcctttcacagtctctggtgaacttcagcttccttcccgagaaactctggtcgtggaacacggaggttgctgatctctcagcggacgtgatggacgctgtcggcggccagaccgaagagcacacagaccttgctggagtgaacacacagctccaggacgacttcacagcgctggtggagcagcttcgtgctcctccgccaagtcttctgaggacaaggtggcgctgtcgcggtatcccgtgcccacgtcgccgccgtcgccgctactgtgagactcttcagcagcttcggcaccaccccacggagcggaggccaccacaacggcgacgagttcgtgtctgcagattgaccgcactccccgagcgacgcagcatcctgggcgagcaaacggcgggaagatctggagtccagtccacaatgcaaccgcggtgctggccgccagccaggcggtggaacaactcagcgccacccgacacgaacaccttctcccacgcgggcagcagcagcaccaacactcgacgccgtcacgaatcgtaggagctttgtgggggtcaccggccaacgcgctggggcaactcgaggcttccagcccgcccccacgtcgccaatgtcccagaggagcgtgttccggttgctggacggcgccgcgtggctcttgaacagcgcgtgcgggtcgcacttggccactgtcacctcgatctccgtctggtggtgcagctgtccacgctcagcgcgttcgtgttcaggtccaggtgcacgttgacgttcccgtggatcgtggaggccccagcgtcgacacagagccgcccgacgcagcggacgcgtctgtcgtaccggacgcgcctgcggacacggagtgcgcgccatggcccgcgtcctgcgcgctgctgacgccgcgagagtcgtgctagctgcggtgccgtccgcccattattgctgagcttggcatgctactattgcgaattttgtgtaatgtaattttcgggaaaaggccaacttcaacttttcggatatgaggccaacttcaacttttcgttagacggcagagcctacaggttccagcgatataactaacgtcctcatgataccaccaatttgtttgtttactccttatatcgcaacatgaactgcttttggtatctttctaatggccatgaactgctgagaagcaaacgagcgcatgtatttgaccttgtcctgcctcctcctgtgtctaaacacactggtttccaacgctagagccccaattcgaactggttctctgtaaaatagcgcgaatgctggcacagcgcttgccgagcagctctaccagtctcttttgaagtgactcgtacgccttggccacgtccacttgtgccttcggtagcacctggcttcatggcgaagacgaagcctgcgagaccttgtccgatgggaactgcagcccggtatcgcgggtatccagagttgccagcgactcctgcatctgattgagaaggttgtgtagggcgggtggcgccgccgatagccgctcgaagttcttgttcttcttctctttggccagcgtacgctgcccaagcgcaaacggactcaacgacgaaagaccggaatccagcagcctggttccgtcgacccagtatcatgacgccgtgatcaagctgcctttcacagtctctggtgaacttcagcttccttcccgagaaactctggtcgtggaacacggaggttgctgatctctcagcggacgtgatggacgctgtcggcggccagaccgaagagcacacagaccttgctggagtgaacacacagctccaggacgacttcgcagcgctggtggagcagcttcgtgctcctccgccaagtcttctgaggacaaggtggcgctgtcgcggtatcccgtgcccacgtcgccgccgtcgccgctactgtgagactcttcagcagcttcggcaccaccccacggagcggaggccaccacaacggcgacgagttcgtgtctgcagattgaccgcactccccgagcgacgcagcatcctgggcgagcaaacggcgggaagatctggagtccagtccacaatgcaaccgcggtgctggccgccagccaggcggtggaacaactcagcgccacccgacacgaacaccttctcccacgcgggcagcagcagcaccaacactcgacgccgtcacgaatcgtaggagctttgtgggggtcaccggccaacgcgctggggcaactcgaggcttccagcccgcccccacgtcgccaatgtcccagaggagcgtgttccggttgctggacggcgccgcgtggctcttgaacagcgcgtgcgggtcgcacttggccactgtcacctcgatctccgtctggtggtgcagctgtccacgctcagcgcgttcgtgttcaggtccaggtgcacgttgacgttcccgtggatcgtggaggccccagcgtcgacacagagccgcccgacgcagcggacgcgtctgtcgtaccggacgcgcctgcggacacggagtgcgcgccatggcccgcgtcctgcgcgctgctgacgccgcgagagtcgtgctagctgcggtgccgtccgcccattattgctgagcttggcatgctactattgcgaattttgtgtaatgtaattttcgggaaaaggcggccaacttcaacttttcggatatgaggccaacttcaacttttcgttagacggcagagcctacaggttccagcgatacgtgatgcatggaattgagaccattaacactgcgtggatgccttcaagcacagtactgccaagctcgtactacgaacaaacacacccactaagctcatctaaggcccgcttttctctactttgcgatgtggttctcaaaatgcagacgcaaagacgccgtctaagctgctcgagtgtcctcttaacacgaccctcgaactactgcatcgacgccgacgcttgcaggtactgcgctataaacagagtagtgggtggcgtcaatgaacgagttcatcgcttcaggcaccgacggctgtctttcagaagaggacggcgagtgaggcgcctctgctgcgctgaagcattccgttcagtgcggacacgtgaagcatgcattccgagcgtatagttaactcaatagcaaaggtcgctggatcttttcttgaagcacacctgcgacaaaagacaaatggttggctcgccgtgggccgagctcgaggagctactgataccatattcatcctggtgatcgcgaatcttggtaccgtattgccaggcagcgcggcgtcgaaagaatgtaagcattacttgctgccagcccggtgagaatatggtatgcttgggatctttggtttgccacgagccaaggagaggagaagagcatggcctgcctgatgcatgtacagtagggttgacagccaaagcgtagccactcagagcatcaccccgatccgtttcgttccggcggtgccttgagtgggagacgcacaaactgcagccgacgccaagtcagaacttacgagcccgacgccgaatttatttcgaacttatttcgtggaaccgcattgttgaagttgcgtgctatagccgtgcgaacgtggctctcgagttgaagatggctacacgagttgaactgaaccatgaactgaaccatgctgtcgcagcagtggtatgagagagggatcggcccacttggcggcgcccctgtcgaggccttctcattctccaatatcagcaagcctccccacccagcacccgcccaggctccctccccatccagccatggctccgtccgtccgccgcctcgtggccctgttcgagtcccgcgccgccgtccgcaccgcgacacgcgcctccgcagccgcagcgaccagcaggacgagggtctccaccctcatcgagtcctacagcgcctcgtcgaccatcgcgtccagctccgtcgaggcgaccgacgtcgcacgctcctccgcggtcgcagcagtggagacgctcgacccccgctggtccatccagctcctcgacgcggcgaggtttgccgagttccagtacggctactccggtttcgaagctccagccgtcgacgaccaagaccaagaccaaggccaaggcttcacggcgctggagccgactgaagagctccacgaagtcactgctgccgccgccgacgacggagacgacgaagactgcctccaacaagcgcctcctgctgagctgcccgtcggccctgtcgacgacgccgacgtcaagagctacagccagctcctgcaggaggccgacgacctcctcgaccgcgtccacgacgcggctgctgctgacgctgcgcctgcagtcgttgagcccaagccttcggagacccagccgcacgtccgagctgctgcagctccgcaagctaccaagtcccgcctgttggacttcaagcagagcgcggcgtttgtcgggcagtgcgcgcaggcaaggcggcggcgcagcgcggcagcagcgaagccccaacgtccgctctggaagctctgagcgacgttactcccgaacgacatgcatgtgaactgtgtacagtagtagtagtagtgcgtgcatttccagacccaggtttgcagtcgacctctgctgcttgacggacgtggtctaggctgcacctcattacgtgcgcgcttgagaccttcctgttcatcgagcggcggggtcgatggtcaagttttcggccgatcgattgcatcccgcgcctgagctgcacctcatcacgtgctggcttagggtgcaggatcagccttcgagaggactcgaggcttgacgcgcagacctggatccacataaattaactaacgtcctcatgataccaccaatttgtttgtttactccttatatcgcaacatgaactgcttttggtatctttctaatggccatgaactgctgagaagcaaacgagcgcatgtatttgaccttgtcctgcctcctcctgtgtctaaacacactggtttccaacgctagagccccaattcgaactggttctctgtaaaatagcgcgaatgctggcacagcgcttgccgagcagctctaccagtctcttttgaagtgactcgtacgccttggccacgtccacttgtgccttcggtagcacctggcttcatggcgaagacgaagcctgcgagaccttgtccgatgggaactgcagcccggtatcgcgggtatccagagttgccagcgactcctgcatctgattgagaaggttgtgtagggcgggtggcgccgccgatagccgctcgaagttcttgttcttcttctttttggccagcgtacgctgcccaagcgcaaacggactcaacgacgaaagaccggaatccagcagcctggttccgtcgacccagtatcatgacgccgtgatcaagctgcctttcacagtctctggtgaacttcagcttccttcccgagaaactctggtcgtggaacacggaggttgctgatctctcagcggacgtgatggacgctgtcggcggccagaccgaagagcacacagaccttgctggagtgaacacacagctccaggacgacttcgcagcgctggtggagcagcttcgtgctcctccgccaagtcttctgaggacaaggtggcgctgtcgccgtatcccgtgcccacgtcgccgccgtcgccgctactgtgagactcttcagcagcttcggcaccaccccacggagcggaggccaccacaacggcgacgagttcgtgtctgcagattgaccgcactccccgagcgacgcagcatcctgggcgagcaaacggcgggaagatctggagtccagtccacaatgcaaccgcggtgctggccgccagccaggcggtggaacaactcagcgccacccgacacgaacaccttctcccacgcgggcagcagcagcaccaacactcgacgccgtcacgaatcgtaggagctttgtgggggtcaccggccaacgcgctggggcaactcgaggcttccagcccgcccccacgtcgccaatgtcccagaggagcgtgttccggttgctggacggcgccgcgtggctcttgaacagcgcgtgcgggtcgcacttggccactgtcacctcgatctccgtctggtggtgcagctgtccacgctcagcgcgttcgtgttcaggtccaggtgcacgttgacgttcccgtggatcgtggaggccccagcgtcgacacagagccgcccgacgcagcggacgcgtctgtcgtaccggacgcgcctgcggacacggagtgcgcgccatggcccgcgtcctgcgcgctgctgacgccgcgagagtcgtgctagctgcggtgccgtccgcccattattgctgagcttggcatgctactattgcgaattttgtgtaatgtaattttcgggaaaaggccaacttcaacttttcggatatgaggccaacttcaacttttcgttagacggcagggcctacaggttccagcgatacgtgatgcatggaattgagaccattaacactgcgtggatgccttcaagcacagtactgccaagctcgtactacgaacaaacacacccactaagctcatctaaggcccgcttttctctactttgcgatgtggttctcaaaatgcagacgcaaagacgccgtctaagctgctcgagtgtcctcttaacacgaccctcgaactactgcatcgacgccgacgcttgcaggtactgcgctataaacagagtagtgggtggcgtcaatgaacgagttcatcgcttcaggcaccgacggctgtctttcagaagaggacggcgagtgaggcgcctctgctgcgctgaagcattccgttcagtgcggacacgtgaagcatgcattccgagcgtatagttaactcaatagcaaaggtcgctggatcttttcttgaagcacacctgcgacaaaagacaaatggttggctcgccgtgggccgagctcgaggagctactgataccatattcatcctggtgatcgcgaatcttggtaccgtattgccaggcagcgcggcgtcgaaagaatgtaagcattacttgctgccagcccggtgagaatatggtatgcttgggatctttggtttgccacgagccaaggagaggagaagagcatggcctgcctgatgcatgtacagtagggttgacagccaaagcgtagccactcagagcatcaccccgatccgtttcgttccggcggtgccttgagtgggagacgcacaaactgcagccgacgccaagtcagaacttacgagcccgacgccgaatttatttcgaacttatttcgtggaaccgcattgttgaagttgcgtgctatagccgtgcgaacgtggctctcgagttgaagatggctacacgagttgaactgaaccatgaactgaaccatgctgtcgcagcagtggtatgagagagggatcggcccacttggcggcgcccctgtcgaggccttctcattctccaatatcctgcctcgccagcaagcctccccacccagcacccgcccaggctccctccccatccagccatggctccgtccgtccgccgcctcgtggccctgttcgagtcccgcgccgccgtccgcaccgcgacacgcgcctccgcagccgcagcgaccagcaggacgagggtctccaccctcatcgagtcctacagcgcctcgtcgaccatcgcgtccagctccgtcgaggcgaccgacgtcgcacgctcctccgcggtcgcagcagtggagacgctcgacccccgctggtccatccagctcctcgacgcggcgaggtttgccgagttccagtacggctactccggtttcgaagctccagccgtcgacgaccaagaccaagaccaaggccaaggcttcacggcgctggagccgactgaagagctccacgaagtcactgctgccgccgccgacgacgaagacgacgaagacgacgaagactgcctccaacaagcgcctcctgctgagctgcccgtcggccctgtcgacgacgccgacgtcaagagctacagccagctcctgcaggaggccgacgacctcctcgaccgcgtccacgacgcggctgctgctgacgctgcgcctgcagtcgttgagcccaagccttcggagacccagccgcacgtccgagctgctgcagctccgcaagctaccaagacccgcctgttggacttcaagcagagcgcggcgtttgtcgggcagtgcgcgcaggcaaggcggcggcgcagcgcggcagcagcgaagccccaacgtccgctctggaagctctgagcgacgttactcccgaacgacatgcatgtgaactgtgtacagtagtagtagtagtgcgtgcatttccagacccaggtttgcagtcgacctctgctgcttgacggacgtggtctaggctgcacctcattacgtgcgcgcctgagaccttcctgttcatcgagcggcggggtcgatggtcaagttttcggccgatcgattgcatcccgcgcctgagctgcacctcatcacgtgctggcttagggtgcaggatcagccttcgagaggactcgaggcttgacgcgcagacctggatccacataaattaactaacgtcctcatgataccaccaatttgtttgtttactacttatatcgcaacatgaactgcttttggtatctttctaatggccatgaactgctgagaagcaaacgagcgcatgtatttgaccttgtcctgcctcctcctgtgtctaaacacactggtttccaacgctagagccccaattcgaactggttctctgtaaaatagcgcgaatgctggcgcagcgcttgccgagcagctctaccagtctcttttgaagtgactcgtacgccttggccacgtccacttgtgccttcggtagcacctggcttcatggcgaagacgaagcctgcgagaccttgtccgatgggaactgcagcccggtatcgcgggtatccagagttgccagcgactcctgcatctgattgagaaggttgtgtagggcgggtggcgccgccgatagccgctcgaagttcttgttcttcttctctttggccagcgtacgctgcccaagcgcaaacggactcaacgacgaaagaccggaatccagcagcctggttccgtcgacccagtatcatgacgccgtgatcaagctgcctttcacagtctctggtgaacttcagcttccttcccgagaaactctggtcgtggaacacggaggttgctgatctctcagcggacgtgatggacgctgtcggcggccagaccgaagagcacacagaccttgctggagtgaacacacagctccaggacgacttcgcagcgctggtggagcagcttcgtgctcctccgccaagtcttctgaggacaaggtggcgctgtcgcggtatcccgtgcccacgtcgccgccgtcgccgctactgtgagactcttcagcagcttcggcaccaccccacggagcggaggccaccacaacggcgacgagttcgtgtctgcagattgaccgcactccccgagcgacgcagcatcctgggcgagcaaacggcgggaagatctggagtccagtccacaatgcaaccgcggtgctggccgccagccaggcggtggaacaactcagcgccacccgacacgaacaccttctcccacgcgggcagcagcagcaccaacactcgacgccgtcacgaatcgtaggagctttgtgggggtcaccggccaacgcgctggggcaactcgaggcttccagcccgcccccacgtcgccaatgtcccagaggagcgtgttccggttgctggacggcgccgcgtggctcttgaacagcgcgtgcgggtcgcacttggccactgtcacctcgatctccgtctggtggtgcagctgtccacgctcagcgcgttcgtgttcaggtccaggtgcacgttgacgttcccgtggatcgtggaggccccagcgtcgacacagagccgcccgacgcagcggacgcgtctgtcgtaccggacgcgcctgcggacacggagtgcgcgccatggcccgcgccctgcgcgctgctgacgccgcgagagtcgtgctagctgcggtgccgtccgcccattattgctgagcttggcatgctactattgcgaattttgtgtaatgtaattttcgggaaaaggccaacttcaacttttcggatatgaggccaacttcaacttttcgttagacggcagggcctacaggttccagcgatacgtgatgcatggaattgagaccattaacactgcgtggatgccttcaagcacagtactgccaagctcgtactacgaacaaacacacccactaagctcatctaaggcccgcttttctctactttgcgatgtggttctcaaaatgcagacgcaaagacgccgtctaagctgctcgagtgtcctcttaacacgaccctcgaactactgcatcgacgccgacgcttgcaggtactgcgctataaacagagtagtgggtggcgtcaatgaacgagttcatcgcttcaggcaccgacggctgtctttcagaagaggacggcgagtgaggcgcctctgctgcgctgaagcattccgttcagtgcggacacgtgaagcatgcattccgagcgtacagttaactcaatagcaaaggtcgctggatcttttcttgaagcacacctgcgacaaaagacaaatggttggctcgccgtgggccgagctcgaggagctactgataccatattcatcctggtgatcgcgaatcttggtaccgtattgccaggcagcgcggcgtcgaaagaatgtaagcattacttgctgccagcccggtgagaatatggtatgcttgggatctttggtttgccacgagccaaggagaggagaagagcatggtctgcctgatgcatgtacagtagggttgacagccaaagcgtagccactcagagcatcaccccgatccgtttcgttccggcggtgccttgagtgggagacgcacaaactgcagccgacgccaagtcagaacttacgagcccgacgccgaatttatttcgaacttatttcgtggaaccgcattgttgaagttgcgtgctatagccgtgcgaacgtggctctcgagttgaagatggctacacgagttgaactgaaccatgaactgaaccatgctgtcgcagcagtggtatgagagagggatcggcccacttggcggcgcccctgtcgaggccttctcattctccaatatcctgcctcgccagcaagcctccccacccagcacccgcccaggctccctccccatccagccatggctccgtccgtccgccgcctcgtggccctgttcgagtcccgcgccgccgtccgcaccgcgacacgcgcctccgcagccgcagcgaccagcaggacgagggtctccaccctcatcgagtcctacagcgcctcgtcgaccatcgcgtccagctccgtcgaggcgaccgacgtcgcacgctcctccgcggtcgcagcagtggagacgctcgacccccgctggtccatccagctcctcgacgcggcgaggtttgccgagttccagtacggctactccggtttcgaagctccagccgtcgacgaccaagaccaagaccaaggccaaggcttcacggcgctggagccgactgaagagctccacgaagtcactgctgccgccgccgacgacggagacgacgaagactgcctccaacaagcgcctcctgctgagctgcccgtcggccctgtcgacgacgccgacgtcaagagctacagccagctcctgcaggaggccgacgacctcctcgaccgcgtccacgacgcggctgctgctgacgctgcgcctgcagtcgttgagcccaagccttcggagacccagccgcacgtccgagctgctgcagctccgcaagctaccaagtcccgcctgttggacttcaagcagagcgcggcgtttgtcgggcagtgcgcgcaggcaaggcggcggcgcagcgcggcagcagcgaagccccaacgtccgctctggaagctctgagcgacgttactcccgaacgacatgcatgtgaactgtgtacagtagtagtagtagtgcgtgcatttccagacccaggtttgcagtcgacctctgctgcttgacggacgtggtctaggctgcacctcattacgtgcgcgcctgagaccttcctgttcatcgagcggcggggtcgatggtcaagttttcggccgatcgattgcatcccgcgcctgagctgcacctcatcacgtgctggcttagggtgcaggatcagccttcgagaggactcgaggcttgacgcgcagacctggatccacataaattaactaacgtcctcatgataccaccaatttgtttgtttactccttatatcgcaacatgaactgcttttggtatctttctaatggccatgaactgctgagaagcaaacgagcgcatgtatttgaccttgtcctgcctcctcctgtgtctaaacacactggtttccaacgctagagccccaattcgaactggttctctgtaaaatagcgcgaatgctggcacagcgcttgccgagcagctctaccagtctcttttgaagtgactcgtacgccttggccacgtccacttgtgccttcggtagcacctggcttcatggcgaagacgaagcctgcgagaccttgtccgatgggaactgcagcccggtatcgcgggtatccagagttgccagcgactcctgcatctgattgagaaggttgtgtagggcgggtggcgccgccgatagccgctcgaagttcttgttcttcttctctttggccagcgtacgctgcccaagcgcaaacggactcaacgacgaaagaccggaatccagcagcctggttccgtcgacccagtatcatgacgccgtgatcaagctgcctttcacagtctctggtgaacttcagcttccttcccgagaaactctggtcgtggaacacggaggttgctgatctctcagcggacgtgatggacgctgtcggcggccagaccgaagagcacacagaccttgctggagtgaacacacagctccaggacgacttcgcagcgctggtggagcagcttcgtgctcctccgccaagtcttctgaggacaaggtggcgctgtcgccgtatcccgtgcccacgtcgccgccgtcgccgctactgtgagactcttcagcagcttcggcaccaccccacggagcggaggccaccacaacggcgacgagttcgtgtctgcagattgaccgcactccccgagcgacgcagcatcctgggcgagcaaacggcgggaagatctggagtccagtccacaatgcaaccgcggtgctggccgccagccaggcggtggaacaactcagcgccacccgacacgaacaccttctcccacgcgggcagcagcagcaccaacactcgacgccgtcacgaatcgtaggagctttgtgggggtcaccggccaacgcgctggggcaactcgaggcttccagcccgcccccacgtcgccaatgtcccagaggagcgtgttccggttgctggacggcgccgcgtggctcttgaacagcgcgtgcgggtcgcacttggccactgtcacctcgatctccgtctggtggtgcagctgtccacgctcagcgcgttcgtgttcaggtccaggtgcacgttgacgttcccgtggatcgtggaggccccagcgtcgacacagagccgcccgacgcagcggacgcgtctgtcgtaccggacgcgcctgcggacacggagtgcgcgccatggcccgcgtcctgcgcgctgctgacgccgcgagagtcgtgctagctgcggtgccgtccgcccattattgctgagcttggcatgctactattgcgaattttgtgtaatgtaattttcgggaaaaggccaacttcaacttttcggatatgaggccaacttcaacttttcgttagacggcagagcctacaggttccagcgatacgtgatgcatggaattgagaccattaacaatgcgtggatgccttcaagcacagtactgccaagctcgtactacgaacaaacacacccactaagctcatctaaggcccgcttttctctactttgcgatgtggttctcaaaatgcagacgcaaagacgccgtctaagctgctcgagtgtcctcttaacacgaccctcgaactactgcatcgacgccgacgcttgcaggtactgcgctataaacagagtagtgggtggcgtcaatgaacgagttcatcgcttcaggcaccgacggctgtctttcagaagaggacggcgagtgaggcgcctctgctgcgctgaagcattccgttcagtgcggacacgtgaagcatgcattccgagcgtacagttaactcaatagcaaaggtcgctggatcttttcttgaagcacacctgcgacaaaagacaaatggttggctcgccgtgggccgagctcgaggagctactgataccatattcatcctggtgatcgcgaatcttggtaccgtattgccaggcagcgcggcgtcgaaagaatgtaagcattacttgctgccagcccggtgagaatatggtatgcttgggatctttggtttgccacgagccaaggagaggagaagagcatggtctgcctgatgcatgtacagtagggttgacagccaaagcgtagccactcagagcatcaccccgatccgtttcgttccggcggtgccttgagtgggagacgcacaaactgcagccgacgccaagtcagaacttacgagcccgacgccgaatttatttcgaacttatttcgtggaaccgcattgttgaagttgcgtgctatagccgtgcgaacgtggctctcgagttgaagatggctacacgagttgaactgaaccatgaactgaaccatgctgtcgcagcagtggtatgagagagggatcggcccacttggcggcgcccctgtcgaggccttctcattctccaatatcctgcctcgccagcaagcctccccacccagcacccgcccaggctccctccccatccagccatggctccgtccgtccgccgcctcgtggccctgttcgagtcccgcgccgccgtccgcaccgcgacacgcgcctccgcagccgcagcgaccagcaggacgagggtctccaccctcatcgagtcctacagcgcctcgtcgaccatcgcgtccagctccgtcgaggcgaccgacgtcgcacgctcctccgcggtcgcagcagtggagacgctcgacccccgctggtccatccagctcctcgacgcggcgaggtttgccgagttccagtacggctactccggtttcgaagctccagccgtcgacgaccaagaccaagaccaaggccaaggcttcacggcgctggagccgactgaagagctccacgaagtcactgctgccgccgccgacgacggagacgacgaagactgcctccaacaagcgcctcctgctgagctgcccgtcggccctgtcgacgacgccgacgtcaagagctacagccagctcctgcaggaggccgacgacctcctcgaccgcgtccacgacgcggctgctgctgacgctgcgcctgcagtcgttgagcccaagccttcggagacccagccgcacgtccgagctgctgcagctccgcaagctaccaagtcccgcctgttggacttcaagcagagcgcggcgtttgtcgggcagtgcgcgcaggcaaggcggcggcgcagcgcggcagcagcgaagccccaacgtccgctctggaagctctgagcgacgttactcccgaacgacatgcatgtgaactgtgtacagtagtagtagtagtgcgtgcatttccagacccaggtttgcagtcgacctctgctgcttgacggacgtggtctaggctgcacctcattacgtgcgcgcctgagaccttcctgctcatcgagcggcggggtcgatggtcaagttttcggccgatcgattgcatcccgcgcctgagctgcacctcatcacgtgctggcttagggtgcaggatcagccttcgagaggactcgaggcttgacgcgcagacctggatccacataaattaactaacgtcctcatgataccaccaatttgtttgtttactccttatatcgcaacatgaactgcttttggtatctttctaatggccatgaactgctgagaagcaaacgagcgcatgtatttgaccttgtcctgcctcctcctgtgtctaaacacactggtttccaacgctagagccccaactcgaactggttctctgtaaaatagcgcgaatgctggcacagcgcttgccgagcagctctaccagtctcttttgaagtgactcgtacgccttggccacgtccacttgtgccttcggtagcacctggcttcatggcgaagacgaagcctgcgagaccttgtccgatgggaactgcagcccggtatcgcgggtatccagagttgccagcgactcctgcatctgattgagaaggttgtgtagggcgggtggcgccgccgatagccgctcgaagttcttgttcttcttctctttggccagcgtacgctgcccaagcgcaaacggactcaacgacgaaagaccggaatccagcagcctggttccgtcgacccagtatcatgacgccgtgatcaagctgcctttcacagtctctggtgaacttcagcttccttcccgagaaactctggtcgtggaacacggaggttgctgatctctcagcggacgtgatggacgctgtcggcggccagaccgaagagcacacagaccttgctggagtgaacacacagctccaggacgacttcgcagcgctggtggagcagcttcgtgctcctccgccaagtcttctgaggacaaggtggcgctgtcgcggtatcccgtgcccacgtcgccgccgtcgccgctactgtgagactcttcagcagcttcggcaccaccccacggagcggaggccaccacaacggcgacgagttcgtgtctgcagattgaccgcactccccgagcgacgcagcatcctgggcgagcaaacggcgggaagatctggagtccagtccacaatgcaaccgcggtgctggccgccagccaggcggtggaacaactcagcgccacccgacacgaacaccttctcccacgcgggcagcagcagcaccaacactcgacgccgtcacgaatcgtaggagctttgtgggggtcaccggccaacgcgctggggcaactcgaggcttccagcccgcccccacgtcgccaatgtcccagaggagcgtgttccggttgctggacggcgccgcgtggctcttgaacagcgcgtgcgggtcgcacttggccactgtcacctcgatctccgtctggtggtgcagctgtccacgctcagcgcgttcgtgttcaggtccaggtgcacgttgacgttcccgtggatcgtggaggccccagcgtcgacacagagccgcccgacgcagcggacgcgtctgtcgtaccggacgcgcctgcggacacggagtgcgcgccatggcccgcgtcctgcgcgctgctgacgccgcgagagtcgtgctagctgcggtgccgtccgcccattattgctgagcttggcatgctactattgcgaattttgtgtaatgtaattttcgggaaaaggccaacttcaacttttcggatatgaggccaacttcaacttttcgttagacggcagggcctacaggttccagcgatacgtgatgcatggaattgagaccattaacactgcgtggatgccttcaagcacagtactgccaagctcgtactacgaacaaacacacccactaagctcatctaaggcccgcttttctctactttgcgatgtggttctcaaaatgcagacgcaaagacgccgtctaagctgctcgagtgtcctcttaacacgaccctcgaactactgcatcgacgccgacgcttgcaggtactgcgctataaacagagtagtgggtggcgtcaatgaacgagttcatcgcttcaggcaccgacggctgtctttcagaagaggacggcgagtgaggcgcctctgctgcgctgaagcattccgttcagtgcggacacgtgaagcatgcattccgagcgtatagttaactcaatagcaaaggtcgctggatcttttcttgaagcacacctgcgacaaaagacaaatggttggctcgccgtgggccgagctcgaggagctactgataccatattcatcctggtgatcgcgaatcttggtaccgtattgccaggcagcgcggcgtcgaaagaatgtaagcattacttgctgccagcccggtgagaatatggtatgcttgggatctttggtttgccacgagccaaggagaggagaagagcatggcctgcctgatgcatgtacagtagggttgacagccaaagcgtagccactcagagcatcaccccgatccgtttcgttccggcggtgccttgagtgggagacgcacaaactgcagccgacgccaagtcagaacttacgagcccgacgccgaatttatttcgaacttatttcgtggaaccgcattgttgaagttgcgtgctatagccgtgcgaacgtggctctcgagttgaagatggctacacgagttgaactgaaccatgaactgaaccatgctgtcgcagcagtggtatgagagagggatcggcccacttggcggcgcccctgtcgaggccttctcattctccaatatcctgcctcgccagcaagcctccccacccagcacccgcccaggctccctccccatccagccatggctccgtccgtccgccgcctcgtggccctgttcgagtcccgcgccgccgtccgcaccgcgacacgcgcctccgcagccacagcgaccagcaggacgagggtctccaccctcatcgagttctacagcgcctcgtcgaccatcgcgtccagctccgtcgagacgaccgacgtcgtacgttcctccacggtcgcagcagtgtaagccagcacgtgatgaggtgcagctcaggcacgggatgcaatcgatcggccgaaaactcgaccatcgaccccgccgctcgatgaacaggaaggtctcaggcgcgcacgtaatgaggtgcagcctagaccacgtccgtcaagcagcagaggtcgactgcaaacctgggtctggaaatgcacgcactactacacagttcacatgcatgtcgttcgggagtaacgtcgctcagagcttccagagcggacgttggggcttcgctgctgccgcgctgcgccgccgccttgcctgcgcgcactgcccgacaaacgccgcgctctgcttgaagtccaacaggcgggacttggtagcttgcggagctgcagcagctcggacgtgcggctgggtctccgaaggcttgggctcaacgactgcaggcgcagcgtcagcagcagccgcgtcgtggacgcggtcgaggaggtcgtcggcctcctgcaggagctggctgtagctcttgacgtcggcgtcgtcgacagggccgacgggcagctcagcaggaggcgcttgttggaggcagtcttcgtcgtcttcgtcgtcggcggcggcagcagtgacttcgtggagctcttcagtcggctccagcgccgtgaagccttggccttggtcttggtcttggtcgtcgacggctggagcttcgaaaccggagtagccgtactggaactcggcaaacctcgccgcgtcgaggagctggatggaccagcgggggtcgagcgtctccactgctgcgaccgcggaggagcgtgcgacgtcggtcgcctcgacggagctggacgcgatggtcgacgaggcgctgtaggactcgatgagggtggagaccctcgtcctgctggtcgctgcggctgcggaggcgcgtgtcgcggtgcggacggcggcgcgggactcgaacagggccacgaggcggcggacggacggagccgtggctggatggggagggagcctgggcgggtgctgggtggggaggcttgctggcgaggcaggatattggagaatgagaaggcctcgacaggggcgccgccaagtgggccgatccctctctcataccactgctgcgacagcatggttcagttcatggttcagttcaactcgtgtgagagccacgttcgcacggctatagcacgcaacttcaacaatgcggttccacgaaataagttcgaaataaattcggcgtcgggctcgtaagttctgacttggcgtcggctgcagtttgtgcgtctcccactcaaggcaccgccggaacgaaacggatcggggtgatgctctgagtggctacgctttggctgtcaaccctactgtacatgcatcaggcaggccatgctcttctcctctccttggctcgtggcaaaccaaagatcccaagcataccatattctcaccgggctggcagcaagtaatgcttacattctttcgacgccgcgctgcctggcaatacggtaccaagattcgcgatcaccaggatgaatatggtatcagtagctcctcgagctcggcccacggcgagccaaccatttgtcttttgtcgcaggtgtgcttcaagaaaagatccagcgacctttgctattgagttaactatacgctcggaatgcatgcttcacgtgtccgcactgaacggaatgcttcagcgcagcagaggcgcctcactcgccgtcctcttctgaaagacagccgtcggtgcctgaagcgatgaactcgttcattgacgccacccactactctgtttatagcgcagtacctgcaagcgtcggcgtcgatgcagtagttcgagggtcgtgttaagaggacactcgagcagcttagacggcgtctttgcgtctgcattttgagaaccacatcgcaaagtagagaaaagcgggccttagatgagcttagtgggtgtgtttgttcgtagtacgagcttggcagtactgtgcttgaaggcatccacgcagtgttaatggtctcaattccatgcatcacgtatcgctggaacctgtaggccctgccgtctaacgaaaagttgaagttggccttttcccgaaaattacattacacaaaattcgcaatagtagcatgccaagctcagcaataatgggcggacggcaccgcagctagcacgactctcgcggcgtcagcagcgcgcaggacgcgggccatggcgcgcactccgtgtccgcaggcgcgtccggtacgacagacgcgtccgctgcgtcgggcggctctgtgtcgacgctggggcctccacgatccacgggaacgtcaacgtgcacctggacctgaacacgaacgcgctgagcgtggacagctgcaccaccagacggagatcgaggtgacagtggccaagtgcgacccgcacgcgctgttcaagagccacgcggcgccgtccagcaaccggaacacgctcctctgggacattggcgacgtgggggcgggctggaagcctcgagttgccccagcgcgttggccggtgacccccacaaagctcctacgattcgtgacggcgtcgagtgttggtgctgctgctgcccgcgtgggagaaggtgttcgtgtcgggtggcgctgagttgttccaccgcctggctggcggccagcaccgcggttgcattgtggactggactccagatcttcccgccgtttgctcgcccaggatgctgcgtcgctcggggagtgcggtcaatctgcagacacgaactcgtcgccgttgtggtggcctccgctccgtggggtggtgccgaagctgctgaagagtctcacagtagcggcgacggcggcgaggataccgcgacagcgccaccttgtcctcagaagacttggcggaggagcacgaagctgctccaccagcgctgcgaagtcgtcctggagctgtgtgttcactccagcaaggtctgtgtgctcttcggtctggccgccgacagcgtccatcacgtccgctgagagatcagcaacctccgtgttccacgaccagagtttctcgggaaggaagctgaagttcaccagagactgtgaaaggcagcttgatcacggcgtcatgatactgggtcgacggaaccaggctgctggattccggtctttcgtcgttgagtccgtttgcgcttgggcagcgtacgctggccaaagagaagaagaacaagaacttcgagcggctatcggcggcgccacccgccctacacaaccttctcaatcagatgcaggagtcgctggcaactctggatacccgcgataccgggctgcagttcccatcggacaaggtctcgcaggcttcgtcttcgccatgaagccaggtgctaccgaaggcacaagtggacgtggccaaggcgtacgagtcacttcaaaagagactggtagagctgctcggcaagcgctgtgccagcattcgcgctattttacagagaaccagttcgaattggggctctagcgttggaaaccagtgtgtttagacacaggaggaggcaggacaaggtcaaatacatgcgctcgtttgcttctcagcagttcatggccattagaaagataccaaaagcagttcatgttgcgatataaggagtacacaaacaaattggtggtatcatgaggacgttagttaatttatgtggatccaggtctgcgcgtcaagcctcgagtcctctcgaaggctgatcctgcaccctaagccagcacgtgatgaggtgcagctcaagcgcgggatgcaatcgatcggccgaaaacttgaccatcgaccccgccgctcgatgagcaggaaggtctcaggcgcgcacgtaatgaggtgcagcctagaccacgtccgttaagcagcagaggtcgacttcccttacgatgagtgcctaaagtctggcggaaagtgtctctggagaatgtatcccggtgtacgcctcatcttgccgtggctcagagtgctccagaggatcaaattaccatgagaatgaacccactactaccatgatcatgcgcaggaggccgctaaacccactgaaagtgtggctttgaggagatacacacgagtccgcactgcagcagacttgttacccagagtgtcgcacggaaacctagagtgccgcacgatgacccagagttcacctccctgagtgcaggtgacccagagttccaaagatgattctctgggtttgggccatacatccagaccctctatactgaactgaagtgtttcccgagccaacacccaagaatccccacagttccccaagattcctcagaattcccaggatttcagaagatgaccctgagtgtcacctggttttcagggattcgagccagtttgaagccagtctgcaatcaaaatgatgcgtgaccttgaagaaccgtcatggaagcacagactggatactttcgaggagtcgagagggagtccttcaccatactaaaccaagtctaaggacccacaattggcacttccgacgccgtgcgacaatggattcgcaagccgatcgcaagtttggaccgctgatcccaaggtatactcaagacaagacattttgaccccaagcatagtgaacagaagatatttgcccgaagaagagagagagagagaagtagctgataaaaaccaaacagagttccttttaccctgtactgcgtaagtgacttcggccaagcctgccgactgaaatccggaggacccgagactacgaccgcgggacgctaagggcatatcaacggcgaaagacagccgtctgtgtgggctccatcaaactcaagtccagtgaggtcgtgaccagcgacggccttgagcttcctggggtgatccatctattccatatcctagttgggtcacttgctgtgctcgtggtagcccatttcatattattccagagggtattctggggtgctaggtagtcgcctccaggattttgtattgactgcttgtgtgaagggaaggtaactgatagtgattgtattttcctcttttattggaggtggtgcgcgttcgtgtgagtctcaggggagctaggcacctgaatttcagactcgagtgaacctagtgtgtgtgacccaccgtccaagggtccaaaagaataagtgacggctagttgtagtgtttgtatactctgtatttgttcgttttatcgagctaggagggcatttgggtaaggtgtcttctgagttccaagtcccagagttgactgaatcctggaccctgaattcgtgatattctgggtttcaggagatctgattctctgggtttgctttttggtgtggaggtgcgttctgaagtagacgtgcgcccccgcacttcttcgaggttacatttttaaccggtggagtgccgtttcgtcgaagacaaacgagccgacagggattacacaaggtgcccacgccaaccaaggagtgtgattctcagggtttaaagctttgcggctgcgaatctctgggtctatcttcttgctgttgactctcaagtcgattctctgggtctacccctggggaacagtcttgggctgcgctatacgaaccccctgggcgacaaaggtttcatcggcctcgcctcaccagttgtttttgctgcttacaggcaagcgtctgctgctgcagctgtacaagctgtcgtacacagtcaagctgttgggctcggtcgcactgctcaacccgctgcattcgtacctggcgttcgaaggcctgggggagaggcccacgcaggattcccgcgctcaaggattccgacatctttccgcgttgatgtaagcggcgaagacgacggcaggagctgatgcggtatggcgtgctccgaacaatggtgtgttgtatatcatgttgtcctgtatactgcattgcatgcagtttattagactgatgttgtatcgtagcctacatgagctaaccagattaatattgatgctgttgaaggagactacggcgaccaagcagtcatgatcagcccgaaaacgagccggcctgagtgaaggcgacgactcgaatgaggtagtagcgaaaagaacgagccgagacgaattccggccaagccggagatgccgctttggtgttcattgtatgaccgatgggcaaacgagccgacacctggcatggctggcgctgctaatgataagggcgagaggtagtaacgtgaacgttagcaaactaatataagcgatttggataaatgcaattgcagtcgatgcggttcccagtatagcgaggctttggatacccacacacatagttgtagatgcaactttgcctttgtatgctccaattagcgaaacggcttgtaatcgctgctttcctgttgactggattggcaaaggcatggctttggcatctatcaatcaaagcagcagctaattgaagtattcaactgtagaacttcttgcacccatggagaaaccatgtggtaaactacatccacctcaagcatgaatgcaggtgtagcgctttagtgtgtgttgttagttgggaagggtccaggcaactaactacttcggtgttgaagtcagtgaaatttgacttagtgatcaaacttggtaattctcgctgctttgttgcttctactacagaatgacatgcttctgtctgcaacgacatgcatcttaggtattgtcttatgtacacaatggtaacgtttcatttgattaccccctggatatttttctggatgtctatttcattttatgtttgtatacggtagtgcatagaatgcctccggacgtgccacatgtttacagaacgcctagaggtgacacctactttgtatataagtttttgtatgggaagtttcaaattacgatttttttaaaatcgggactcgctagggccctagtttctgttcggcgggcatcctgtcactatccgtggtaagtagcattattcagcatgggtatgccacactggagccagcacggccttgttggcctccatcgtgaatcctatcttccctaaccatttttgaatacaaacatcaagtctaattacgctgcatacggtatgcagtttacatgttcttttcggctcccggtctggaggggttaaacttgttactgtacacatgtacatatgcaaccggctctgtagagtaatcttgacgggaagatatgcaaagctggatggtggatgtaccgtatcgttggcaagatccgctcaataagggctggagtcgccacaatacatcttctgtcagttctagattttcgacgaagagcacgcaactacccgtccctccagtcgcgatgaagctcggactaccctttgctatcgcgctctctgctcttgttgcagcccaagctgctgtcattgactatgacaaggtccagccgttccctgagctcgagcccaaaacgatttccgagaaggctgctatcaagtacaagcccagcctggccatcaaggacggctgccgctcttacgctgctgtgaatgcggccggcgacacgagcggcggaatggacccaatggcgcccgacggaggaacggtagagaaaaacccgtacggtcacggctgcaggggatcggtattgggctcgcaagtgtacagccgatctgggtggtaccgcgacgtttgggccatcatgtacgcttggtacttccccagagacatcagttgggatgaggcgagctacccacccgtccgccatgactggatcaacaccatcgtctggcttaacaacccggcgctggagaatccgtcgcttctcggagtctctgcctcccgggaagacgccgaatacgtggcctatcctcctaccgtgaaggagtttatgaacggcacccaccccaagatggagtacttcatgggcttttatgtgggcgggtatcacacaattgatgtgtcgttggaagcgggcgactttcaagacctcgtccattggtcgcagctgacggaccaagcgcgcaaggctttggagactgcggacttcggtgtggtaacccccgtccccttcaacgacgtcaacttcgagaagaatctagagcggggctggtatcagaacgacacgatcctagaacacaagatcgggatcgtgtagttgcccctacacacgattcgaaagctgtactcgttatcagaatactgcaggaaaaagtaattttgagagtgcatttggctaccaagtacgcaccgattgccagtcagcttccaaaactgcctaaagtactctgcaatccactctcggactagatcccaatttggaagactcgctcgcaggtcgtggcggtgcagatacgaggcccgcgtatcgctacgtgtatgacgtacggtaccggtactgaccgcgagtgtacacattttcgaggacccctccggatcgatgaagccgaagtgaggttagatactacttattggtgataacgttttcgcgataacatagcaaagttgctgttgtgcagcaattttaagaagacatcgcaagtgcaagcaatcgcctctaacagcgctttcgacataggaccaagtcaaaccgaattgtcaccaatgcgcgataaccgcactggcagtaaaaagaaaagttttaattgattttttatttttatggtactctcaatttctgtaggtaacaactactaatttttactttatttatttaacttgcgttttgttggtgacggaagcgcggctggcgcaatggaaagcgtatcaaacttcgaatctgggggttgcgggttcgagtcccgcgttccgtacatttttgcagtgcaaaagtgtgcaatatttgcacgagtacgtacacggcctcgtcccttgcgtcgaaagcgctggtagcaaaatagctggctaaatgcgttcaagtgcacgcgtacactcgccacgctgtaccatggcaacaaaacgcttcccgatccgtatggctcggtgtaccatgtgatccgaatttaaggccgaatttagagttgatactccacaccagcaattgtttgggctgtcagtgaagatcgcggctcttggtccagcgactgttccaggcgggatatctctcccccatggatatcaacccgcgacggacggcggccacacagccagccaagatcttctctctctctcttgtcgatgctttccatcgtctgcatcgattcgccacttctcgtcccgagtagaaggtcgtccaagtcctgcgtagcgtcgtttccacgtgcgcgccaatgctttcgagccccatccggctcttcctcccgctggcggtagtcgccaccgtattgctcggtgtctcggccgagcccgagtggtggctcgtgccgccgatcgactgccaagtcgggccctggggcgacttcagcggctgctccgccgcctactccacggtcaagacccggcgccgcaacgtcgtggtctggccgctgttcggcggggcgccgtgccctgcactggaggagtcgcagccctgcgtgcgcgtcgactgccaggtcggaccctggagcgcctacacgtgcaaccctttcacgggctggaagacgcgctcgcgggtggtcacggtccggccgcaggacggaggcgccgcctgccccgcgctctcccagagcgtaccgtgcgaccccatcaactgcgtcgtgagtgactggacgccgtggagcacgtgcctgctcaaggtcaagtcccgggcgagaacagtgcagacgttcccgctgtacggcggcttggcgtgtccgtcgctggtggaagttcaggcttgcgtccccgtggactgcgcggtgggggcctggagtgcgttcaagatcctgggcacgatcaagactcgctcccgtgaagacacgtgccagccagacggcgggttgccgtgtcctccgctcgtcgagcaggttccgtgcaatccggtggactgcagcccggtatcgcgggtatccagagttgccagcgactcctgcatctgattgagaaggttgtgtagggcgggtggcgccgccgatagccgctcgaagttcttgttcttcttctctttggccagcgtacgctgcccaagcgcaaacggactcaacgacgaaagaccggaatccagcagcctggttccgtcgacccagtatcatgacgccgtgatcaagctgcctttcacagtctctggtgaacttcagcttccttcccgagaaactctggtcgtggaacacggaggttgctgatctctcagcggacgtgatggacgctgtcggcggccagaccgaagagcacacagaccttgctggagtgaacacacagctccaggacgacttcgcagcgctggtggagcagcttcgtgctcctccgccaagtcttctgaggacaaggtggcgctgtcgcggtatcctcgccgccgtcgccgctactgtgagactcttcagcagcttcggcaccaccccacggagcggaggccaccacaacggcgacgagttcgtgtctgcagattgaccgcactccccgagcgacgcagcatcctgggcgagcaaacggcgggaagatctggagtccagtccacaatgcaaccgcggtgctggccgccagccaggcggtggaacaactcagcgccacccgacacgaacaccttctcccacgcgggcagcagcagcaccaacactcgacgccgtcacgaatcgtaggagctttgtgggggtcaccggccaacgcgctggggcaactcgaggcttccagcccgcccccacgtcgccaatgtcccagaggagcgtgttccggttgctggacggcgccgcgtggctcttgaacagcgcgtgcgggtcgcacttggccactgtcacctcgatctccgtctggtggtgcagctgtccacgctcagcgcgttcgtgttcaggtccaggtgcacgttgacgttcccgtggatcgtggaggccccagcgtcgacacagagccgcccgacgcagcggacgcgtctgtcgtaccggacgcgcctgcggacacggagtgcgcgccatggcccgcgtcctgcgcgctgctgacgccgcgagagtcgtgctagctgcggtgccgtccgcccattattgctgagcttggcatgctactattgcgaattttgtgtaatgtaattttcgggaaaaggccaacttcaacttttcggatatgaggccaacttcaacttttcgttagacggcagggcctacaggttccagcgatacgtgatgcatggaattgagaccattaacactgcgtggatgccttcaagcacagtactgccaagctcgtactacgaacaaacacacccactaagctcatctaaggcccgcttttctctactttgcgatgtggttctcaaaatgcagacgcaaagacgccgtctaagctgctcgagtgtcctcttaacacgaccctcgaactactgcatcgacgccgacgcttgcaggtactgcgctataaacagagtagtgggtggcgtcaatgaacgagttcatcgcttcaggcaccgacggctgtctttcagaagaggacggcgagtgaggcgcctctgctgcgctgaagcattccgttcagtgcggacacgtgaagcatgcattccgagcgtatagttaactcaatagcaaaggtcgctggatcttttcttgaagcacacctgcgacaaaagacaaatggttggctcgccgtgggccgagctcgaggagctactgataccatattcatcctggtgatcgcgaatcttggtaccgtattgccaggcagcgcggcgtcgaaagaatgtaagcattacttgctgccagcccggtgagaatatggtatgcttgggatctttggtttgccacgagccaaggagaggagaagagcatggtctgcctgatgcatgtacagtagggttgacagccaaagcgtagccactcagagcatcaccccgatccgtttcgttccggcggtgccttgagtgggagacgcacaaactgcagccgacgccaagtcagaacttacgagcccgacgccgaatttatttcgaacttatttcgtggaaccgcattgttgaagttgcgtgctatagccgtgcgaacgtggctctcgagttgaagatggctacacgagttgaactgaaccatgaactgaaccatgctgtcgcagcagtggtatgagagagggatcggcccacttggcggcgcccctgtcgaggccttctcattctccaatatcctgcctcgccagcaagcctccccacccagcacccgcccaggctccctccccatccagccatggctccgtccgtccgccgcctcgtggccctgttcgagtcccgcgccgccgtccgcaccgcgacacgcgcctccgcagccgcagcgttcagcaggacgagggtctccaccctcatcgagtcctacagcgcctcgtcgaccatcgcgtccagctccgtcgaggcgaccgacgtcgtacgctcctccgcggtcgcagcagtggagacgctcgacccccgctggtccatccagctcctcgacgcggcgaggtttgccgagttccagtacggctactccggtttcgaagctccagccgtcgacgaccaagaccaagaccaaggccaaggcttcacggcgctggagccgactgaagagctccacgacgtcactgttgccgccgccgccgacgaagacgacgaagactgcctccaacaagcgcctcctgctgagctgcccgtcggccctgtcgacgacgccgacgtcaagagctacagccagctcctgcaggaggccgacgacctcctcgaccgcgtccacgacgcggctgctgctgacgctgcgcctgcagtcgttgagcccaagccttcggagacccagccgcacgtccgagctgctgcagctccgcaagctaccaagtcccgcctgttcgacttcaagcagagcgcggcgtttgtcgggcagtgcgcgcaggcaaggcggcggcgcagcgcggcagcagcgaagccccaacgtccgctctggaagctctgagcgacgttactcccgaacgacatggatgtgaactgtgtacagtagtagtagtagtgcgtgcatttccagacccaggtttgcagtcgacctctgctgcttgacggacgtggtctaggctgcacctcattacgtgcgcgcctgagaccttcctgttcatcgagcggcggggtcgatggtcaagttttcggccgatcgattgcatcccgcgcctgagctgcacctcatcacgtgctggcttagggtgcaggatcagccttcgagaggactcgaggcttgacgcgcagacctggatccacataacttaactaacgtcctcatgataccaccaatttgtttactcctgacatcgcaacatgaactgcttttggtatctttctaatggccatgaactgctgagaagcaaacgagcgcatgtatttgaccttgtcctgcctcctcctgtgtctaaacacactggtttccaacgctagagccccaattcgaactgattctctgtaaaatagcgcgaatgctggcacagcgctcgccgagcagctctaccagtctcttttgaagtgactcgtacgccttggccacgtccacttgtgccttcggtagcacctggcttcatggcgaagacgaagcctgcgagaccttgtccgatgggaactgcagcccggtaacgcgggtatccagagttgccagcgactcctgcatctgattgagaaggttgtggcgccgccgatagctgctcgaacttcttgttctacttcttggctagtgagtgtacgctgcgcaagcgacaaagcgctcagcgccgacagaccgaatccagcagcagcggcgacaagaacgtgggcaaggcgtacggagacagcaccaccaggtcctcagaagagttagcggaggagaacgccagtaccgcgcgaaacagctcgacaatcgctgtgaagtcgtcctggagctgctagatcaccggccgctgatggcatccactacgtctgctggcagagcaacagcctccgagcgccacttccagaccttcccgcgaagctgaacttcatcaaagcctgtggggtatagtttggccacgacgccaaaccagccgaagctgagtagccatccgctgcgagactcatcagcagcttcggcaccaacccacggagctgaagccaccacagcgacgacgtctgcagatcgatcgcattctacgagcactccacgagcgatgcggcatcctgggcaaacaaaccgcccgtggggatctgctcctgagaagtccagtccacaatgacatagcggtgttgccggcgaaacacaactcagcgccatcaggcacgagtatgctctccaacacggccaattgctgcagcggaagacgtcacgaggccatggagcgttgtggcgtcatgacccaacgcagtgagcagctcgaggccccatcccacgccgcttgctggacgacgccgcgtggctcttgagcagcgcgtgcgggttgcacttgaccatcgtcacctcgagcttcgtctgggggtgcagcgtggccggcggcaggaacggcgcctccaggtccacgagatgccggcttgcggcccgacagcacggctagagctcagcgctcgcgttcaggtccaggtgcacgttgacgtttccgtggatcgtggagccccgcgcggtagctgcggcgcattcttgcagtgctccggtgaaatttgtgcctgctgtctattgggatttttgtggttggcctcaaaggcccaactttaacttttcggataaatggccaacttcaacttttgctggtctacaggaaacgtgtgcaattcttatctaacgttagtgtgtcaccccacttcaatccaccatgcattatgcggcataatttatgcccgatcaaggtgttgctgacctaacatgttgcacgccttaaaaatacgacttgatcttcgcggcgatatcgtcgacgcgcgccgcctgggtgaagaagtcgaggaactcaccgtcagggccaacgaggtacatcacaatggagtggtccaccagatagtcgtcgtcctcctcctcgttctcgtctgccttggagaagtacacgcggtaggccttggtgatgtccgccacttggtcgcgcgtgcccgtaagcatcttgaactttgggtggaagtcggccttgtaggcctgcatctgccccacggtgtcgcgcttggggtccaccgtcacgaacagcggagcgaccttagggcacttttccgcctccagcttgtccagcacgtcgccgatgcgcaccagctcattgggggcagatgtccgggcagtgcgtgaagccgaagtacagcagcgagtacttgccgcggaatgtcgcgtccgtcaccgcgcgcctcgtgtcgcagtccacgagagtccatggtccgcccagcagcggcttgcccaccgacgtcaccttgctcgtggctaacagcagcagtagcagcagtaatgacaagcaccaatccagaagtccttgctgcagtagaatcctccagatagatcaaacgcacactgggtctgcagccggtccttctccgagtagtagtagtacacgataccgctgcccacgacgcccgccagcgccaagccgctccacgtaccaggctgccagcgcaaagacatcgacacaatcagtgcgtcaagcgtatctacggtattcaaacgaccggcactgcgcagtcctcaccccgaacttgtcgctgcgcgtgccgggcgccggtgcgtccgagaacatgcgcctcgccgcgtgtccgcgacgcaacacccgtggccgtcaccactcgccccgccatgctcgtgacaacttgaaaagtgtcgatcgaccgccagctaacaaagtgaagagagcaatcctgctgattgctcacaccattggcctccatttcagcgaatcaccgaccgccaatcgattgggggggatcactacagttactgtagtacagaacagtatcggtatcggatccgcttggaccatggacgttatggcgcgctacgtgcggcccatctacgaggctatcgacgcgcgccagtacaagaatgccatcaagctgtgcgcgcacaagcgcgtggcgcagctggacatcgtgcaggtgctcaaggcgcactgcctggagcgcacgggccgcgtggacgaggcgctggacatctgccgccgcgtgcagctcaagcagccgacggacgagacgctgctcaacaccatgaacctggtcttcaagctgggcggctgcgagcacgagatgctgcccaccttcgagcacgcgtgcgccgtgagcagcccgcccaacgaggagctctacgtggcgctcttcgtggcctacgcgcgccgcggcgccttcctcaagcagcagcagacggcgctcaagatgttcaaggccttcggcaacatcaagtacgtgtgctgggctgcgctcagcatgatgctgcaggtcgagcacggcggcacgcccgcgcgcatgctggcgctggccgagaagatgctgctcaagacgctgcgcgagacgggctcggacgacggcgaggcgctacagctcacggtgctcatcatgcagctgcaggacaaccaccaggcggcgctggaggcattcgacgagttcgtcaaggtggacgacggcaagtccgacaagaagcagaagaagaacaaggacaaactggggcgcgctgcagagggggagggcgcctacgacgaggacatcgagctcggacccatgcaggccatcgacaggctcacgctcgaagcggcgctcgcgaagaacgtgaccaactggacgcgctgtgcggcggtaaaccggaagctgctggaggagtacaacgctgacgactggacgttcttgaaggagtacatcgccgcgcgcttcgaagagaatgcggaccgctcgtcgaaagatctgctggcgcttggcgaagagatgacggcacttttgaacgacctgcaggctcgtccgggcaacgaacgcattcgaggccccgctcttgcgttgatccacgtcagcagcgagattttgcgccgtcttaaggcgggagacaccgctgttgcgcaggtggagacgaacctgcaagagctcatcgttgcctacgcgaaccgattcttctccaaggcgtgctgcttcacggatctgaagcagtacttcaagctctacctcaaggagagcacgtcggtgtcggcgtccgcgaagtccaacctgatccagcacttcaaaaagctgtcggaggagtccgctgccttgctcaagaacaagccggctggtgatgagattgatgaaaaggtgcggaaggagggccaaggaaacttgagcaggcgtctgctcgcactcaagaccctgcgcttcctgggctactacgacgacgctcagaagttctcggtggaagttttggctcacttggttgaggagctcgagagtgagtatgaagcgacgagctggctcaacgttggtagcgccggcggccagcgcgaggtgcagcttacggacgacttgctcctgctggcgacgcactttttgctggatatttatcagcgctcgagcggtcatcgtgaatacttggagcgtgctgcaggtctgcttgagtacggtctggagaagagtgcctacaatttccagatgaagctgctcctgtctcgtgtgtacggctacctgggcgctgcggaagccatgttgagccgccacgccgagctggatgtgaagtacgtgcagctggactcgctttcgttcttggtgctcgataagattctcgacctgtgccaataccaagaggcgcgcaagttgatcaacagaattacgggtctgcaccacagtacggcgaaagacacgcccgatcacattacccgtgcttaccgactcggtgtctactcgaaggtggtggacatgtcttcgttcttgcacaagcgcatgaagaagtcgcacacgctggccatcagcaagggagagacgctgcgctttgagttgctcgacgctctgtcccatggtccctcaaagcttcatgaactcgtgacctcttcgagctttgaagcgcaggtcaccggattggaaaacatgctcgcgtccgatggcgctgagttgtcccataaccagcaccgcgaggttatcgtagactggacttctaagcagcagatccccaccggcaatttgtttgcccaggataccgcgccgctcgtggagtgtgatcgatctgcagacgctaactcgtcactgctgtggcttaagatccgagtgctcgtcccgaagctgctgaagagtctcgcagcggatgaccactcagcttcgggtgatctggcgaaggaatacagtgacctggtgactgcgctgcacctcacaggctccggttctggtgagcttcagcttcacgagaggctctggaagtggagttcggaggctgttgctctctcagcagatgtgatcaatgctattggcgaccagggcgtagaacagaaggacctttctgcagtgatcacgcagctccagaacgacttcacagcgattgcggagcagcttcgcacggggctggtgtcctcctccgctagctcttctgggggccaggtggcgctgtcgccgtatgccgtgtccacgctgtcgtcgttgctgctggattccggtctgtcgtcactgagtgcgttggcgcttgcgcagcgtgcgctggccaagaagaacaagaagagcgagcagctctcggcggcgtcacccgcgctacgcaaccttctcaagcacatgcaggagtcgctggtggccttggagacgcgcattgccgagctgcagttcacttcgcacaaggcctcggaggcttcatcgcggggccaggcgcaacagaaggcacaggcgaacgtggtcaagtcgtacgcgtcacttcaaaagagactggtagagctgcttggcgaccgctgcgccagcattcgcgccatcctgcagaagtaaagtgagttttagagagcctggtttggcaataaagaggtcgccaagcccaaggcggcgcaaaaatgcatggtcggttgaagtgaagcaacaacggttgactggcaaagggttggtaggtgggtacgtggctagctacgcggaaactcattaggaagacgcggccgccgtctcgagcgccttgatgaactcgtctacccgcgcggcgttcaccttgagcaagaactgcgtgagctcgccgccctcgacctgcagcgccaacgtgacgcccgtcttcttgcccttggcctcgtgcggacgcaccgccatgcccttgtacagcgccgagttgagcacgatcttgccgatctcgttgcgcaccaggatgcgcgcgctcttcgtgtccttgctgacgagcaccttgagcgggtgcacgcccttgtctgcccagcgcttctcgtccttcttgaactcgaagatcctggccttctcggccaaaaacgtgcagtcatcgtccggggagtcggcctgtgtaaatagaaggagacagccacgttagactcggtggatcagtgcaactactgtgcaaaccttcacgaaccttgataataacggtggcctcctcgcgtccaatgttctcctcgtcttcatccgcagcggcagtggtcgacgccgaagtcgaagtagccgatgctgcagctccgaagctaaacccaccagtggcaggcggcgtgctcttggtagcactcaggttgccaaacgagaacccgccggtggcaggcgtagaagagaccgcgggggccgtcggcttggacagaggagctccaaacgagaacgcaggcgtaaccttctcctccgagttgatagacttggcagagaagagcgagctgccgccaccgaacgagaagcctccagcggcaggtttggcaggggacttggcggactcgtcgtccttcttggcagcaccaccgaacgagaaagcgggagcagcagacttggctggggacttggtggagtcgtcggtcttcttcgcagcggaaccaaacgagaagccgctgctggcgggagcctttgctggctcatcaggcttcttggccgcaccaaacgaaaacgaggagctcgacgccgcgggggtaggagacgccgcagtcgcagtagacacaggagttgaaccaaaagagaatggggcaggagccgcagccttggactcgttgatggcaaccggcttcgtggccgcgtgcttggtggcaatctcatccgcgtatttcaagtaatcctgcaaaagttgcacaccccactcatcagttcccactctctccgcagctgcacgtacacgctccagcaacaactgcacacctgaacggcagccacccagctcgcgctcgggttcctctgcgactgtccgttgacaaacgccaggaagctcttgttgagcgcctccatggcctgttggtacgaccccgaagtcgccgtcgccgtcgcggtcgaaccactggtcgacacactggtcttctcagccgcgggcttggcagcgccagtgagacccgagaacccagcaaaagggttggaggatgccgcgggcttggccgccgtgagtccctgcgcatgggaggaaaagacaccacatccatgagcatgaatcccgccactaatgcaccaatgcaaccggattaagacggacctggaagcctccgaacgggttgctcttggcctcgtcgtcgcccccagcagcagctgcagccaccgccgccttgggcttggcggccgagcggcccccgacgcgcgccttgacgattttgcgcttgcggatcgagtcctcgctggcgcgctggaagccgatctcgaacgagtcggcgctcacgtcgtcgtccgcggcctcgtactcctcgcggcgcatctggccgttctcgttgcgtcgcttggccatggccacgtcggtcggtcgggtcttgccaatactgagctcttgggaggtcccgatcgtttttggccagttgatgatgtcctaacgaattacgcggtgttttaggtgcgtgttattattttgtggattaaatgccaagttgaagtggcccgacagtagcatggcaaaagggatagaagcaaccaagcacatgaggagcaggatcagagtagcgtgcagcaaaactcgtgttcatccgggcgctcgcgtggcggcgtcactcgctcccaacgtcgagtctcgtgtccttctcgatacttgtccatcaccttgatttccttccacagggacgagcaacgaggcacggggcagaagcgaacgacgctatcgtgctcgatactcgagacgacgccgacaaagtgatgggggcgcaggctcaagacgggaccgccggtgaacaggatgtcctttgcgtagtccagactgtttggttgggctagctccagtgacgcgagctcgctgtttgggtccgccaaagcgccgacgtggccacggacgaccaaaggggtaggaaagaaaatgttgcccacgcagtagggcatgaaaaccatcggatccatcgcctcaaactccttgtcaggctccagaaacgggattgggaacggggcttcagctatcaaaagcgacagcgaagtgccgcaggtctcaaaatcctgaacatgttcgcagtggaggccgatgccatcgaaacgcgtagccttacacgtgttccggtcggcggtagggtagatactgctggtggtcaggaggaagccgtcctcggcaataaagaagctcgtctggtagaagctcttgtcaacgcccgatgggatcttcgcgatcgccgagtatgaggctgtacgggacttgggggcgtggcgggcgcctcaatctcttcaagctctcgtcctcgatcctaatttcctcttcgaggcgagcattctcggcctccaagctcgccgacagctctgcatagtattcggctcgctgcctcgagctccgacgagcagcacgttccgcaggtgtagtgtcttcttccatcgatattgcgctgtgcgaatagtcccattttgccagtgatagtccgtcatttcgaaaacggtattgatggacatcgatcgaagccgcagacgcgacccagagtaacagaaactgactgggacgcgcccgacgttctgcaaacaacatatatgctaaaactctccatctatctggaactcgatcgtatttgcgagatgatagcacgtgacgatgcaatttggacaacgcaagaatcgcaatggacacaaacgcagcatccgcggagcgtgcagcccatgcacgacccaaccagcagggccggagctggacacaatggagtgaacgctatgccgagctgacgaagaattgggaagccgagacagcgcgcctcgaaaaggaaattaagctagcggacaacccacgccaccaagtcccgtacagcctctgcgaggtcagcaaggcatactccgcgatcgcgaagatcccatcgggcgttgacaagagcgtctacccgacgggcttcttcattgccgaggacggcttcctcctgaccaccagcagtatctaccctaccgccgaccggagcacgtgtgttgcgacgtgtttcgacatcatcggcttctactgtcaacacatgcaggactttgaggtctgcgggggcagctccgttcccaatcccgttcgtggagcctgacaacgagtttgagacgatggatccgatggttttcatgcccttcggggacgacattgcgtacccatcccctgtggttgtgcgcgaccatatcggcgctttagcggacccatacagcgagctcgcgtcactggagctagcccaaccaaacagtctggactacgcaaaggacatcctgttcaccggcggtcccgtcttgagcctgcgcccccatcactttgtcggcgtcgtctcgagtatcgagcacgatagcgtcgttcgcttctgccccgtgactcgttgctcgtccgtgtggaaggaaatcaaggtgacgatggacaagtaacgagaaaaccacgagactcgacgttgggagcgagtgacgccgccacgcgagcgcccggatgaacacgagttttgctgcacgctactctgatcctgctcctcatgtgcttggttgcttctatcccttttgccatgcttgcactgtcgggccacttcagcttgacatttaatccacaaaataataacacgcacctaaaacaccgcgtaattcgctagaacattatcaaccggccaaaacgatcggacccaagagctcattgtgtacgagagcagcagaggtcgtgtgctcttgaacgttatcttgtgcttccgctgtagcgcgatgcatttgccgaaccatctcacttcaacgtcttgcttgtcaaactttcggtacctgtaccatatagatggtacttcgtaccacttttgggcactcgcacgccaccagccacttgaattgcgtccagccatcccgagccagcaatagggtcacaattgctcacgaagtcatgggcgccaagcagcagcagccggaggacggcgagccgtcgtcgccgcagaagggcgacttcctcaagctgttctggacgctggccgagagcgagcgcggcgtgcgcacgcaggctgcggcgcagctgctcgcccacctcaagagcagcgccaagcaggaggccgaggtgcagtacacgctcaagcgcctggtgcgcggcctggcctcgtcgcgcgacgccgcgcgccagggcttcagcacggcgctgagcggcctgctgagcgccttccccaagcagctcgcgctgcagagcacgcacgagctgctgcgcgacgccatggaggtgcactcgtccatgaagcccatggagcagcgcgagcacatgttcggccgcctcttcggcctgctggcgctgcaccgctgcggccgcctgagtgccgacctgccgctgctggtggccgtggtcaaggagctgctggacatggccgcgttcaagcgctggtttcgcgaggcgtgctacgaggcggcgctcacgctgctggcggacgtgccggccgagcagttcctggcggagctggccggcccgatccacaactgtctgcagattcagccgtccaagggcagcgacgaggaaggcgtcgaggcctggaatgccgaccaggtgctgctcgctgtgggcgtacagcgctacctgcacgtgtcgggcatcgaccaggacgaggaacagatgaagcagctgccggaaaacttcgcggccgtcaacgcgctgcagcgccacaatgtgcacgtgctcgcgcgtccgctgcgcgggtcgtcgggctgctacccgcgcgtgcactcggcctggttcggcgtgttcggccacgtgctgaatccgacggaggacgcgtcggccacgctcgatggtgagctgttccaggaggcgtggacggtgctggtagagaactcgctggtcgatggcagcaacgcggacgacagtgcgcctaccagccacgagcgccagggcctggcgttgaagttgttcgagctggtggcgcccaagctgccggcgccggtgctgcgtgccatcctgaccccgcgcttcgtcaagtggctgtacaacaacgccgttgccaagaggaactacctgcacgaggctgcgcgtcactgcctcaagtctttcgctgcgtgcgcgcccgcggagtttttccacttcgtccgcaagcagttcgcgactcccctttcgatcctggtgacgtcgacctcggctgatagcgacgacgaagcggaggaggaggagaagcccaagaagaagcagaaactgagcgctggaggcttcgacaagctcgtggagctcgaggagaagaaggagcgcgaggaggcgctcaagcgacgcacggaccgcgctcgtgtgtgggcgctggagacgatggtggctgctcttacggagatgctgagcgccaaggccgaggcggatgatgagaccaagaagctgcaggatgacgcagtccgattcctggtgttccactcgttcttcacgccgtcgggcgaggctgagtctacgccttccaagaagagcaagaagaacaaaaaggcgaagaagagcgcgaagtcggcggacgacgaggtggtgaaagaggcggctgaggccacgcctgctctctcggagaacgtggccaactacgccaagacgcgtctgttttcgctcttgagcctgggtcttgcgggtgccgacggtgcgcgtgccagcgccagcgtgctgagccgcattttcgcgatcgcccaggacatgcagaccaacagcggtgctgttgtgctgcgggagcctcttagcgaggaggtggcagcgcagtttactgctcttgtgggccacatcgacactctgcgcagcaaggaagccgatgaggtcgagaaggagaagaagacaaagaagtcggcggcgcaccgtccgctgagcgaggcgttcctgttgttgttcatgagcgccgggcttcagcttctggatagcgagcagcgtgaggacgctgctgtggtggcggctgatctggataagtgctatgcccagctcgttgctcgtgagcagaagactacccccaccaagaagaagagcaagaagaacaagaagaaggaggctgagcccgaggagacggaggaggagtcggtggttgtgctgacggacttgttgctgagtctgctgtcccaggactcgagtgcgctgcgtgagatcgtgtcgcaggtcttccgttcgctgctgccgctgctgaacggtgcgtgtttgaccacgatggtaaacgtgctgcagccgtcgaccgagggtgaaggcgctgctgctgacgacgaggacgacgagttcgcccccattacgcgtcgcgaggatgaagaagagaacgacgaggaggacgaagaggaagaggacgaagtgatgctgtcctcggccgatgctgtgtctgatgcgcttcgcaacgacgagaagctgtcgcagctgcaccaggaggacctggcccttgctgctatcgtcggacaggtgaagcaccgctcgcagcgcaagaaggacctgaagcgtgctcgcttgcagacgatgcacttccagctgcgtgtgctggacctgcttcaagtgtttgtttcgcagcgtcctgagcagaccgaggcggctactgccaagcacaacgctttggtgctatcgttggttgccccgctgttccgcgtgcttactcatgtgcagaacgccgacaccgagaagctggtgctccgggatcgcctgcaggccgtgctgcttcacaaggtgcttcgtgccaaggacaagatcccgtccggccaggctgctccgaccgaggcgttggacgctctccgccagattgtggagctgatccgcacggtcgctatggagaaggaccacaccggcaaggttgcgtcggctgctgtcgtgtacctcgtccgcgtcatttgcaccagcgaggcgtctagcaaggaggaagtgcagaagatcatccgtgcgtccgtgctggacgccttcaccaagaaacacgcgcgcttcccgcgtgcgtccttcgaggagcttctgaccaagtctccggctgtcggcgcccgtgtgctgctcgagcctcttgctgctgttgctgcggcgtccgagaagaaggaggacgctgacgagtcggaggtgcgcgccgctgtcgacgagttctccaagtgcgaggtgttccgtctcctgacggtgctgctccgcagcagcagcaagctgcagcagagtggcgtgctgtcgaaggcgcagcgcagtgcgttcaagcgtgtgcagacgtctctgaagacggcgctcgtgcggcaactggccccggagagcgtgcagcagctcaaggcgaagcgcatgaaggtcgtgatgatgttcgcgctgcagctggtcaagttctggcaggcgtccgaggacaagaaggcgacggaggccgacgtccgtgctgtggtcgctgccgtgcaggccgtggactctaagtcgcccgtggtcaaggatatggtgaagcaggtgtcggacgctgccggcatcccgttcgtggctgccaacggcgccaaggcggacaagaagaagacccccacggaggacgaggacgagctcatgcccgagcaggacgaggatgaggaggacgcacagaaggccaaggccaagaagaccaagggcaaggccaagaccaagagccccaaggacaagcagaagaagaagcgcaagcgcgccgccgccgaggagtaagaaagtcgtcagccgcttacaaactgggaggaacgtgtcgccctgcgtctcgcgtcgtcagtcggcagtcgatcgcttcccccataaggccccacctattatagatactagagcttttgtgtgacttccttccctccttccttccgccttgccacgtcattccatccatacacagtagaccatcatcatcacgcacgagctcacactgcagacttgcatccctcctccttgttgcacctcgggcacgttaccgccgcgtcacgccaacgagcgagaagcgacacaagctcctatactaaaaaaactgtctgctacgccgcgagggttcccattgcgtccgtcatacgtctgtgactgctgcttgcttgttggagggtgaaaacttgggggccgcgcggggcctcgccgggtatcttttaagtgctgtcctgtcgtctatggagtcgctcgtctagccgcggaacttgccccacacgtgcagcagcaccacgaagcccacgaacatgaggcagctcacgagcaccgtcgtggggccgatcttgaggccgggcgagtcgtccgtgtagaagcgcaggatgccggccgtgctgccgcccatgccgcggcccgtgttctggcccgagcgcgccgccgccaccgggcgccggttgcgcaggccgctggccgccgcgccctcggctgacgccgtcggggcgggcttctttcctgccaaagctccgttcgctcccacagcctgaaggaggagagagaagagaaggcacagccagtaggagttagctacgcacgcgcgcacggaggacggaggggggatacgccgccgctgctgcacgcaccattgttgtgtatatagcttggtagtccttcgccttgctggtaccggagactctctctgtttgattgtgtgcgcggtcgatccaaagccgggggagggaaattggagctgctgccacgtatcaaatcgatgcccacttaagtacgatgcgacgatgtctcgacgaaaaatgtgtgacgtgtgagaacggcaacttgggcccagcacgtgcgtgtcagagatcagaggtcccagtacgtcgcgttcgggtcgctgttggcctgcaggatcgtcggccgtacgactggagggagctgctgctggtgttgttgcccttgtccttgctgctgtttcttcttgcggaggttcaggtacttcttcttctggtaccgctcgtacatcgtgcgcggcgccagcgtgctcagcagcccgacgcaggccaaggacagcgagatggctgcgaacacgaggaacttcgagcggcgcgggctgtccgcctctggtaactcgggggctgttgtggtcgctaccgtgtccacggagccgcttgtgctgctcgcgccgttgatgccgtacttgacgttgaaggcctcgtccgacaacacgcagagcagcgtgtcctgcacgtagcgatagagtgcaccgctgtcggagcacgagaggcttgtggtgaccgacacgttgaacgtctctaagctcgcgaacagcgttgcgtccgtctgtcgaatctcgaactcctgcagcttggtggtggacgtgacgacgagcaccttcaacgagctcgggaaggcgattccgccgatgtacgtgatggggttttctgatagcgtgagcgttgtgagcgagtctgggagggaaatactgcgtagacttcccaactttccgttcgatgcagtgctgtgtaagcgggcttagtctgtgtagcacgttgagctcttaagatatggcaacacttacaactttgtgaggctgcttggaaaggtaaagtcgtgcagcgaagtgaacaagttcttggatagatctctgcaagcaacggaggagtcagagctccgaattgatgtcgaaacagccctccttgagcttacagcgtctgtactgtcatagggatggacacattcgcgagcatcgcgatgctgttgcttttgagatccctaagaaaacaactttgctggtcagctaatggacaagagggctagcaacgcagtaggtcgacatgtacagcttcacgacgggcggcaggctctccacgtagacgatcttcttgctgctcaagtccagctctttcactccgttgctgtccgtcaacaccctcacaactgtcgtgctgcagtccgcgtactcgatcaccgcggcagcgtacgcagttgatgccgcatagttggacgcggtcgcagcagggatcgagcacgtcgtggtggcagctctcgcaaactcgttcacggtaatcccagccaagcagcacagcaaccacggcaccactgcagtcatctcgtggcaggtcaacaagtggccaacgtgacagaattagctgccccaagttgaagtgaagtgtagccatctgctcaatacaatgtgtacaccacaccaatccaacagatctgacagggtttacgcacatcaaccaacggccaagcgaccatggcgacgagcttggcgacggcgctgacccaggcgctggacgcgtcgttcccgcgcgtggccttcatcatggcgtacggctcgggcgtgtttcagcagaagaaccacgacgccagcgccagcatggtggacctggtcttcgccgtggacgacccgcgggcctggcacgcgcagaacctcgagcgcaacccacagcactactcggtgctcaagtatctgggcgccgccaacgtcgccgccttccaggagaatttcggcgccggcgtctactacaacacgctggtacggtgcaaaactaggcgttattatggtggtatgtggctgactgactaatatgcttgctggctggcaggttcctctcacgggcaagctgctcggcacgcgactcatcaagtacggcgtcgtgagcacccagacgctgtgtgaggacctgcagacgtggaagacgctgtatctgagcggccgaatgcacaagccagtacgttcgttgaacaagctctgtggtgactggtgaaggcggtgaaaactctgggttttgtggtggtttataggtcagtattatcggcaccagcgatgcaatccaagtggcaagctcgaccaatctgtcgcacgcactgaactacgcgctgctctgcttgccggaaaagttctcggagcacgacctgtacatggtgagtgggcagacgtgctgggagggaattagatacgtgggaaactaacgttggcggtgtacgttgaattgggagtagaagatcgcaggcatctcgtacctgggcgacttccggatgacgttcggcgagaacccgaagaaggtgcgcaacatcgtggatggcaacctcaagtcgttccgagagctctatcaacacaagattcaggtaagagtcaactcgctttcgtgcccgtttcgacttcaggttatgactgacaacttgctgctgtgttgcagaactcgccgtttatgtctcgctcgctctccgacagcgacatgctcgtcgcgaacagcagcgatctcaaggtgcggcaaaccatcgtagagtctttgccgtccaacgtgctgaagcgcctagtgaccaagtcccacacgactggcgcgttcgaccaccaagctgtcaccaagaagcagttgcagcgcgtcatcgcgacgatcgtgttccggtctagtcgctcacagagcatcaagggcatcgccactgcaggcggcgtcaagtccatcgtctacgtcgctcagaagctgaagcgcacgtacttcaagtgacattctgcaccttttgaagatcatccggctaatccagtcgaagtggaaggaaaaagcgtatacaaaagttatctatctattgtgcacttagacggtcagcaccttcttcaggtactcgacgcgggtcttggtctcctgggcaaactccttgtcctcaccctctagtgcgtcaatctgcttgatgcgctggtcgcacttggcgagcaggtcgagctcgggcttcttgcacgccgccatgaagtcggggccgatcatggcgaactcggccagtccctccacggagcactcgcacaggtccacgtcttcgtgggtgatgaaggccgcggccgactggatgaagaagttcttctgcagcacaaggtcggccgtcgagcggctgttgcggatgaggtagcgcaggaagaagagcgacttgcgctgcagtcggatgtccgtggcctcctccaggttctggcgcatgagctccaggcccttgcagctctcgcccaggaaccgcgtctccgccgcggcgtggtggcgcaccaggcacgagatgcccagcagcgccttgacgcggcacgtgacgtcctggtcctcgcgcgcgagcgtgcacagcacctcgagcaggccgctctcgacggccgcgtcctggcagaaggggttgttctgcaccacgacggagcagacctcggcggccagcgcgcgcgacgacggctgcgcgtacttgcggatgacgttggtcatgacgcgcaggccgcccatcttgacgaagttctgcgcattgtcgatctggtcgatgcgcgtgagcagctcgtccagcagcgagtccttgtactgcgccagctcctcgggcgacggctgctcgccctcgtcggcgatggtgccgtcctcggcggcgaacacgaggcgcgggtcctcgccctcgaggatgcgcaggatgtccttgacgcgctcgttctcgtcgatcacgccctcgttcatgaccatctccaggaagcgccgcttgtcctccgagatgggcgtcgcctcggtgggcgtcgtgccgtccgtgtgcttcatggtccacttcatgagcgcctgccacttggcctggtccgccatgggtgtctgggagttggccgattgctttgtgacgttgattggcttccgacctgccgtctctgattggaagcttctagattctagacaattctagactctaggtttgactcggccaatcacaaaaagacttggagtttgcatgggaccaacttgaagtgaaaggcaacattttgtgagccaagcagcgtcatgaccaagctgccggcacttgtgaggcaatctgatgctcctacctcggaacaagggctcactaccgacaagatgttcaagctgctgctcaagttggatggcggtgtgagaagccgctaaccaacgcggccttggatacttggagcgcttacttggttcaaggtggcattaagaatattgaaagagccgcgcgagtgaggaatgtgcccaaaactgaggagactgcgaagaagttgcacgctgcacagtttaagcagtgggtccaggatggtgtcgaaccagcgcagatctggaaaattctcaagatggagtagacagcatgggtgagcaagccgagcgcaggcttttggctgggatgcaaaacaagctcagtaacagaggttccgttaccatccggcgtagtagtactgttcaatacaatcgttcacttgactgtcgcattcgcttcagaacaatgctaccgattctgtactggaagtagctttctatggtgaggaagttgtgaatgtcaccatacgcagcaaatatttgacgtgtcaccaaggattcatgttctcttataagcgctagaatgtacagcaagcgggcctattgcctacttgcttacttacttctcgtcgaagaacttcttgagcgactggccgaacttgccgtcgaagaagatctccgagggcgggaagcgcaccgacggcttggcaggcttggcctcagggttcacgtggcccagagccaccaccacagggatgctgtagcggtccgggatgcccaacgcctgcttcaccttggcctggtccaggccttccatggggcacgtggcgaggccgtgcacctgagcggcgtacaggaagatggcagcagcgaacgtcgtctgcttgtaggcccacgcctccgtagacacgttggggtcgtgttctcctgagaagagctcgacgaggaccgggaccttgctcacgaaaggctcgggggcgccgttgtcgcggttgagctgctgcatgcgtgcaacgttcttgctgggctctggaggcacgtacacacagctgtaacaggtgggcccggcaggtggacccatctgagcatgacagcgacggaggacgtggtgacggacggcgacgcgacgcagatgtcggaggcgggcgactgcgcgaaaatcggcggcacgaaggagaccaagtacctcgaagcggcggcgctggacgcgccgagagtgggcgaaatgccgctcagtggcatgaggcgagacgggtgaacgcctgaccgcccaggtgtatagcttggcgcgtcccggtgtagactcccgaatggggtgcacccagaacaaaccctagccggagatagtacacctagatgtacactccaaccggggtggcatgtgtccttgtgaacaatccctgtgggttcgtttgtcttcgtaaccaggggtcttcaaccgtggatgagttgtcttgatacttgtaggtcgctaggtagcagggcagaacgtaaccttcctggacgtcgcctctgacagccctcagataaccaaacaatacaaacagatacagagttatatacaaacacgtagcccttccttattcttttggaccgtgaaagggtcggtcactactccagtcaactccagccggactccgggatactggtcaatcccggtcggttttggctcacgcgcaccaccctcaagtactgagggaaactaacacaatcgaatacctcgtatcacacaatagctcttaaataaatacttcccacccggggctactccaaccggggtgacaaggtaatcggtaatatgaaatgcggggccttcctggtctggacgagctcaacggcaactaggaaatgaaatgcgatggatcaacctcgggttgtcgcccggtactcaccccaacttggactggacttggttgcgggagctcaacccagatgtcacagttgctgggccctcacgcgtagacttagtcagtcctccgggaatgcacgtccggtaggctgctccaactcacttgcgcgatccttggcaaaacgaactctgtttatctgttatctgtggtctctctctgtctgtctggctatcttctgtcgatctttacatgcactccatcttgacttgtcttcactatggtcttgtcgtcgtaatcgtccgcggcccctcgtaacatatttccagcaagtataatcatcactgggtacgcaagcgaaattcaattttccacggaatccgaacagatcttggctagtcggcttggtcggtcggaaacatcttggactttgtatactggatcttcacatctgggatgggatcttggtatcttggtatctccattcgggattcatgattatctccaaacgggatcacactccacttgggcttcacatccggggtatcttggacagctttatagtttctgggtcgtcactcaatccggtcgggctcctcttgcgttgtacagtgcaccaagagcaggcggcctccagtcggaggcacttctacgctcccttgggctttgcctctcgttcagtacttggttccagccggggtccgctcttggggacatctccatccggggtcaccaaaccttgtacactgccaacgcgagtccggccgggatccgctcttcccatacgcacgtgtcgctgcctccctcttccatagtgagcctctgagccaaccaatcacacgtgcggctcggggaatcctcgaaaatctccaattccatcgtgtcaaccgcccctcttgttacgatccattgtagagtccattcggcgaaacgatcgatcatgacaagatctcacgatccgagcaagcccagatgcgtgggcgccccagacggggatgtcttcagtcaactcccaactctggtgtctcttctttgcgccctgtcccaaccgggtcgcttttcgtcaatttctctttccagtctgcggcaacgaaatctccactcacaacgaaatctgcgcgccactactcacaccatggacgcccccgcatcgagcgccgacgcaccgcttatcccagcgcagctcccgccctctgtgcctccagtgggggtgcggaggcgggcgcgggcaacggcggcggcagtctggctgctagtggcgaggcccatatgtcggctagggccggcagccctgcgcgcaaggtcggcgaggccgaagagaccatggaagtcgacgagcaggcgggcaccggcgaggacgacgacgtcggcgaggaggaagaggaggaagaggagagtgcagcgtcttctgcgaggaactcgcccctgcgcgccagtgaccagcccgtccgggaggacgaggccatggaggaagtccccatccgggatcctccggccgggcacactccgactgtcactgcggctatctccagtctgctctcgctggatgaggcggtcgagcacacgcggtctggcactctgccgtcgtcccatccgggacctcgcggcattgagaacagcttgcctgcgcgtcacatcctcccgcccaagcgtcctggtgatggcaactcctacctggtcggcgttcctgcacacccgctggcgtatcagtccgagcgctacgtccaggaggggtatggcggcacggaggcgctagcaatcttcgacggcttctccgctcaggatctccacgacttgggcaacctggttggcagtcagacggagctgcgcaataatttgctgcgcccgcatgccaaccgggaatctcccaggctgccgcagctcgaggccaccttgaactcattgctgtggcgccgggagtccgcctctgtgctggcccagttcccagccgggcgcttcgcggagaggctcttcttcacgacgtccctgctccaccgtatcctcgaccgggcacggcgtggcgacatccccattcaagggccggttgaggtatctcccggcgggggcgccaccctgcaacagcgttacgacaggcttgtcgacgagcaccgtttcctgcagatgtatcaccagcgggaggtggctgcactccgggcggagaaggtggaactccaagcccagctggagaatgacttcgccttggtggcgcaaagccatctggatgaggaaaactcgctgcgcaacaaggtcaccgaggccgaggccaagctcgagcgggcaatcttggccgtccagcgtctgcgggtcatcagccaggaggatgcgttttacaccgaccggctgatgcggttcctcaaccaaggtggggctgccactcgcggtcgatggcccaggctggtgcgtccgctgcggcacttccaacgggggtccatacctcctgcacactgggtcaccaacatcaccgtcgaggctgccgaccgtccgttcaggatgatcccgccctatccgggcccggtcgacccggacatggaggacgatgatgacaactaccaggcaggcgatggacacggcggccaggatggtgaccgtgaagagaagtcggaggacaacccacccacccctctccgttcggacttcccgcctgcggatgcgtctccgtccaaacccaagcggcgtacatccagggggtctcgttcggggtcatgtccacgtggtatgaccgagctttccagcaagggtgggccggtgtacgtccaaatgcgacccacggtccacccgggatctgatgtgctccctctgtcaccccagacggacttcaagcgcctgatttccggctgtgctgcatcgctgccagagtttgtcccttggtcggatgtccggctggatgtccagttcgtcatgtggatggaccatgggtacgaagaggccttggacatcctccgtcaggattgtccggcccaccagtatttcccaaagccttggctgctggagatgctggtcaagatgatgtaccatggcaccctggacgacaccctctggacgcgtcatgttcccgagaccttctacaagatggctgcggtcatgctccagggtcgtctccggtcgggtatgtatctggaggagtttccgccactgcgcaacttggccgaggaggctgctgccgagatggagatcgtcgaagttgacggctccagtgaaagtgacgactctcgtgaccccgactacgaggacaaggccaagacgtctccatctgggaagagcgcggatgggccatccaaggcggagtccattgacgagagcagctcgtcggatagcgaaaccgatgaggagaagccgtccaagaccaagcgcaaccccaagcggaaccgcgttcagtcatcttcggacagctccactgaggacgagctccagtcgtcttcctcatcccagcgtcggtctccccggttgtcgtcccagaaggaaccccggtctccccggtcgaagttcgtgctgcaggataaacctgatcgaccttcgtccaagaagaacccaaaaaaacgcagccggacgtcgaaacccaaacgggagggtggcaagtcgcccctggcacagaagtcttacgaggacctgaacagcagggaattggcgatcatcgagaccccatctggggacattgtctcgtggcgtcgtcgtggtgtcggcactcgtttctctccgaagaaaggtggcatcgagggccagacgcctgggtttcctaactacgcacctcagcagcctgagaccaagtacctggtcaggcgttggcctgcagtcgaagatgagtatgcggccctggtcgagaaggaaccctggctggagatgtttaacaaccgggtcaaggtcctgtacttccaccgccgggaccaactatccccagctgtgatccgcatcctggaccaacatgtggagtatatgaaggatcaccagccttctggcacatcctgcactggttcatgatgaagaccaagcctgaagacgacgagaagtgcgacgacctcacgatctacgatcgggctcaagatctccaccgcaagcgccaggcactccaccacggtgttgcgcgcaccttcgaggcccgcatcaagcgtctgatcaaggccggcatgccgaaaacgatggtctgggagcctggattctggttgtacccgtgcaagatctgctacctgtacgtggtcgacgaatcaaccaagaaggacgatggcacgcgttacaccctggctgaccagatcgcgatggctgaactcgaagaccccggccggactcagtggactacctgtacggatgacgagcgtctggcgcacgtcccagccaagatcgtcgacaagatgctgcttccagagcacgagcgcgtcaacaactgggtctcgaccaagttccagtgaagtcatcctcccatccagcatccacagcggtcctggatgtagttgcatatccgtagcgtaacactttaattccacaatcaccgttaacgccttcgctgtattcatcgtttccttcttcggtcaggttatccaggtcggttcaaccttaagcgcagccttgttcatctcttgccgctttggcacctccttcagggcgacatagtcaacttcatacactcgtcgtcgagaactccattctcgctcgggttgctctccataatcacaactccatcgtagatccgctccatacaaattcacaatcaattttccgtaattcacacattcacatccaggcatttcgggtctccgtctgggaatgtccaactgggatcaatactcccaactggggtcgccccattcggacttgaccactcccaactattgtatgttagggtggtcgtccccagcctgcatggcttggaaccgcgctcgggctttcgccccttgattgaactcatacaagagcgctccgcaattcagctgtgccatcggtatccattcaggctcatcgtaccccttccatttgatgagatactctcgtgcccgtttggacgtccgtgtacgcttgttccacctgagatccatgatcttctccacttcgtactcgtcattctcgttgtccgcctcccagctctcttcgggaagaagtgctgtgtcaaagtcatcgttgtcttcgatctccggttggattataggccgtctgggatacaacgtccggggtttcagtcgactgatgtgaacccaagggtttacacggtaaaccgtgtcctcaaccttgagcctcacccggaactcgtcaaccacttcggcgatcctgaatggaccatgccacaagtgggccaacttgcgactcagacccggttgcacttttgggatgtacagccagactgcatccccaacgttgaaacctgccttgagccggtctgacaactcgttccacttccgggtttgctcttccgagcgagcccgtttggccttcctctggaggtcttctgcacatgcccgagcgtagccgtagtcccgctggagtttccttcgcaactcatacgcggtccgttcagggacactggagggttaggccccagcatagctgagatcgtactcttggcgtcccaaccgtggaccaggtagaatggggtatccagccgggttgcatcaaacgacgtattgagcgcgaacatgagtctctctgcgtggtcatctcagtcgctctggtcagcttctgcgatgtaagcccggatggacctcaccacagtctggacggaacgttcctcctgtccattcgcctggggtcggtatgccaacgtagctcgctgtcggctacccagaagttccctgaaccgagtgaagacttcactcatgaacctgggatcctgatcgtgacgcagcagggagctggctccgaagcagcggaacaccctctcctcatacgcttcagcgacatcctgagcggtggtagaactcatcggtttgcacataacgaaacccgaaaacgcatcctggaacaggagcaagaacgtgttaacccgttcggacttcggcaaatgggtcacgaagtccatcgagaccacttcgaaaggctctctggactcgatgttcccgggcgaaggtcctggattcggcggacgccacttgccactggcgcagtcggtgcactccttgacgtatctttcaacatctgcgtacatccctggccagtagaactccagccggagtttctcgtgcgtccgggttattccctgatggccaccttggaaatcctcatggacgtaatgcaacatgtccagacggagtgcttccggtacgactaggcgcaactcgtcggtcttgtcgcgaggttggtcccgattggacctgaccagtcgatagagcacgtcccgaacgtccaacgcaaataggtctgcccgcttggacagcttgcggatctctagtcgggaaaagtcatccaggtcgcccttaaggaacttcttcagattcaccaactcgggatcagcgtcctggtgcgccttgatccggcgccacctctcagcttgatactcaagtgggttcataggctcaccccggttggagtcctcgcggctctggctacgagttaatgcggccaggaccctggctgccattggcaggggagctgactccggcccgggaccagcatcatccggcactccagtagtagattcccgactgggctcgtcggggggatcgtcgctcggggccacttcaggcttcataatctgttcgtggatacgagagacttgccccagatgttccatctcgtccgggtcatttatcgcacaggactctccgagcgccagtgtcttggacgtcaagtaatctgcagcctggttgtactctcgcttgacatgtaccagccggatcgaggcgaagttccgtttcatctcctcgtactcggccagacgtcgctgcaggtttggctggttgcagttaatcagtccttgagcctgttgtatgacgatccgagagtctccgacaacaaccacatccgggataccccggtcgtggatcatcttcaacccattcaggaggccgaggtactcagcgtcgtttaccgtaacatcatccaggatgaaaccccacgcggccaggactttccagccggggagctcccagatggtacacccacaacttcctcgcctcgtcgatgtcttcgcagctccgtcgaaactcaagacgtatccagcgaaattagcctccagcatctccacactgatcaccggtgggggtttcacttgacccttggccgggatgagcgactcagcaacctcgtccaggtgctcacgcggcgttatgccagcgcccaggattgcagccaggccgtcttcgtctcgcttcaccttctgcacttccaagtcccaatgggatagtgttaacccccaccggacatgtcgcccgtcagcggtcttggacttcaacagccaggacagtactgagtacctggtgtataccttgatcgggcaaccctggacgagagtgttaaacacatccagaactcgcatgacagcaaccgcctccttctcggcaatgtggtatcgtgaggcgaggccgatgaaacctttgtcgcccaggggggttcgtatagcgcagcccaaaactgttccccagggatagactcagagaatcgacttgagagtcaacagcaagaagatagacccagagattcgcagccgcaaagctttaaaccctgagaatcacactccttggttggcgtgggtaccttgtgtaatccctgtcggctcgtttgtcttcgacggaacggcactccaccagttgaaaatgtagcctcgaagaagtgcggggccgcacgtctacttcagaacgcacctccacaccaaaaggcaaatccagagaatcagatcccctgaaacccagaatatcacgaattcagggtccaggatttcagtcaactctgggacttggaactcagaagacaccttacccgaatgccctcctagctcgataaaaccaacaaatacagtgtatacaaacactgcaactagccgtcacttattcttttggacccttggacggtgggtcacacacacactaggctcactcgagtctgaaattcaggggcctagctcccctgagactcacacaaacgcgcaccacctccaataaaggaggaaaatacaatcactatcagttaccttcccttcacacaagcagtcaatacaaaatcctggaggcgactacctagcaccccagaataccctctggaataatatgaaatgggctaccacgagcacagcaagtgacccaactaggatatggaatagatggatcaccccaggaagctcaaggccgtcgctggtcaccacctaactggacttgagtttgatggagcccacacagacggctgtccttcgccgttgatgtgcccttagcgtcccgcggtcgtagtctcgggtcctccggatttccgtcggcaggcttgcccgaagtcacttgcgcagtacagggtaaaaggaactctgtttggtttttatcaactacttctctctctctcttcttcgggcaaatatcttctgttcactatgcttggggtcaaaatgtcttgtcttgggtataccttgggatcagcggtccaaacttgcgatcggcttgcgaatccattgtcgcacggcgtcggaagtgccaattgtgggtccttagacttggtttagtatggtgcaggactccctctcgactcctcgaaagtatccagtctgcgcatccacaacggttcttcaaggtcacgcatcactttgattgcagactgaccgcgaactgactcgaatccctgaaaatcaggtgacactcagggtcatcttctgaaatcctgggaattctgaggaatcttggggaactgtggggattcttgggtgttgactcgggaaacacttaagttcaatatagagagtctggatttatggtccaaacccagagaatcatctttggaactctgggtcacctgcactcagggatgtgaactctgggtcatcgtgcggcactctaggtttccgtgcggcactctgggtaacaagtctgctgcagtgcagactcgtgtgtatctcatcaaagccacacttttagtgggtttagcggcctcctgcgcatgatcatggtagtagtgggttgattctcagggtaatttgatcctctggggcactctgagccacagcaagatgaggcgtactctggaatacattctccagaaagactttccgccagactttaggcactcatcgtaagggaaagtccgcggctggactgagtgttctctggaattctgggcgtgcactcccagcattcacacttccagccagttgggcccatctgcggtcagacgctggattcatcccgagaaatcacttctctcccacagtcgccatccatgtcacacgggtacagccgcgccgtatccaagtcatccaccaatcagcatccgatacaaactccaggtcacagaggtgacggcacatcgtcggcaattttctggggaccgcctcgtgtcatccgcccctcctggtccgggtccatcaaagaggaaatcgctccgaactggtgaaccatgaccaggccacaaaaacacacaggttcatccaccgtcgacttcgatacggccgttgcactctgtcgactcccagggtttcactcactttggcgacaccctgtctccccaacggttggtcaggacctatcttcaaggttctcctctcaaacgcaaaactccaacgggcaatgcgcggtcacatcgccatttcgcagatcgtcaacatggcggagagcgcgacttcggacggcaagcaagcgacggcaccagctcaaggcatggcgccccccggcagcgcgccacctccgacacagcagcgcaccggcgacgcccctgcgagcaccgcaccagcaggcggtggcagcggtcagacgggtaactccgcgtccggcgacacttcgacgggcagcaccacgacgggcgcgaccaagcgcgtctccttctccaacgccaccggcaagacctccgacgcgaacatgcgcgaggccgatggcaacgcctcggctgatgctgcaacccaggaaactggtgacgcgaactcagagttcaaggctccagacgcgggcggtgcggcttcggacgtgaacatggagggcgcccctgagttcaagttaccacgacacgcgacgctagaggacgtcaggggactcatctttgcaggcatgcttcggcaggaggaggtcgatccccctgactccctggtccctgaacgccccccccccccgcactggaaactgccggctccgccgaatctaaagaccaacgcgtatctcgtgggggtcccagggatcgtgaatgacattcgcgtgggcgcgttcgccatggaaggctacggcggcgcgaccacgttagtcggcttcgaggagctctccgacgaggatcttcagggattgaaggaagtctgtggcgccgacgctggaatcgatgtcctatgtccacgtcgttcgcctctttcagcgttcgaactggacaataccctgaattccatcggtattcgacgcgagatggcctcactcctgcgtcacttcaacagcacaaggctcgctgagcgcgttttcaagatgaccggttacctgcgtcgagtcctcggggcctaccgaaacatgcgttctctggctgactctcagcagggtttcaccgccactcaggaagtagtcgacacgcgacgcaagtacaaggaactgaagcgcgcctggaaattcacgtgcgactactggttcctggaggtccaagaggccctgggcaaggtggatgacgctgagtccaagtacaaagtcgcgctgggcgagcagaagacgcggtatcaagacgagattgattctctggagtccgagaaggcgcaactcaaggcgcgccttgctgactctgaggcacaagtgcgaatcctgaaatcgcgtcttgagtcagccacggggacccctggaagttctccgatttccttcaagagcacacagacttcacgggtaattgggagcgcctccacgacctcttcaagctctgcatgaaggactcgaaacctcccgaatcatgggacactgtcatcaacgtcacggccatggacaagcgcaaggcagcggtggccccgtacccagagaaaagtatacgtatgcctccgtcttcggggtctggatcgtccggtcgtcctgaaattctggatctcacggatcctggcagcaagcctcgctgcggttcgaagaccgggggcaaaactcaggattccaagaaatctcagggttccaagaaagatcaagaccccagaaaatcacgggattccacggcgccgggcgagtcgccacggcagtcagcgcaccctaagcctcacaaagttcagcgtcgccccaaggatcaccaaccaggccgcgactctgtgcgtcgcgccagcgagaagactgtggtgtccaaggaggccgcacacatgatgctcccggggggtgtcgtctggaaggaagttcggccagacgtgcgtcaggccattcttgctgggctcaagtacgacacagccatggagtggattggcagcgaccgggcggctcacgggcacttcaggcagccgcatctgaacaagatgctcgtgagcatgatgtactggcgtcgtcttgtcctgactccctggagcaagtacgtccctgaagcctactacgaaatggcagacgagcgtctggacaggtgccttcgacgcggtgatttgccaccaccctggaggaacctcgatgaccacatggtgtaccctgatgcggacgccgattccacggtggacgacatcgagaacgacccggactaccagcctcccgcccaggaacctgaggagaacgcctctagtaatagctccgaagaggaggaggaggaggtcgcccctgaaactctggaggacatcgaggacgcagaggacgacgacgacgcagaggacgacaatggcgtagaggacgacaatggcgtagaagaacccctggaagtcaagcctcctgctaagcgcccccgttctgagtcaagcaagaaacctcagggttccaactcgaagtcgaagaagaaacgtcgcacgggaaacaagacagacacttctgccactcagggttctagtggtactcaggggaccaaggctacatcacgctccaagcatccgtcggcgctcgcgcggaaatcgtactcggagctcacttcaagtgcgttgatgacggccgaagaccctgaggacaacgagacctcctggcgcatctatgggattcttgttcaatatccaagttcgacccagagtgcgttttgccagactcccgggttcccagagtacgagatccacaagtattcgttcgacgttgctcacgagcgctggggccgtgaggcataccaagaagtcctggattctgaaccctgggagagtatgcttcagggtcgcttccgagtgttctacttccatgagcgagagctactctccgcgaaagcgctcaagctgatggaggacgtcgtggacgtcatgcacaagcacgcacaggcaaactgggagcgcgggcactgggtgcctattccgactgaagaccaagcagacgccaccatggaatctcagcggaagtcgcgtcgaaacgcgctacgcagagcgcacaagacgctcgtcgagcgctcgcgcaacacccctgggttcatcccgtcgttgtggcacgaaccgggtctctggaagttcccggacaagtgctgctactggatttgggaggatcccagggccaagaaactcgggggagctgagtgcaaggacttagacgtccagctagcgacgttggacattcgtgagcctgctcgagtccaatggaacacggcggctgacgacgatgagtggctacaatacgtgccgaacaacatcaagcgccacatcaagcgcctggccatccgcaagctcaacccgctgtctctcaagcactcgtgagagtcaaggtcaccaccaaatcccgagaaccacccgaacttcacatgtcgtagcgtcattctccttaatacccaggatttcatctcgacttcaatgtcttccccagaaattcatcattttctgacttgttctctgggtcatccgacttcgtttactatctccatgtccttgtaaagctcgccgccttcatcttccttcttacacactgtcaaagcctcagcagtatcaccttctccataatcaaatcaaatcaaatcacattcacgttttccgtctccaatattcacacattccgtcgattttccccagagtttcacagtgtcacccagagtttcccctgaatatcacgtgtaactctgggtcattgtcaccccagagtgctagactcctgggtgatcatctccagcatgcatggcctggaaacgggcccgcgctcttgcgccttgattgaattcgtagagcagggcaccacagttgagcttcgacacaggcagccactcggtctcatcataccccttccacttcacaaggtactcacgaattcgtctcgctgtccgagtccgtttagtccatcgcaaatccaggattcgctcaacttcgtactcatcgttcgcagcgtcgggctcccaactgtcttcaggcagcagcgccgcatcaaagtcatcatcctcgtccacgtcgatctccacagtgggccgcttcgggaatagtgctctgggtttcaaacggctcacgtgtacccagggattcacgcgatatcctgtgttctcgaccctgagtttcacgcggaagttgtcatggatttcctgaattctgaaggggccatgccacatgtgagccagtttgcggctcagcccgggctacattttgggtatatacagccgcacagcatcaccggctgcgaatcctcccttcagtcgtttggacagctctctccacttcctggtttgttcggcagagcgcgcgcgcttagccttcttctgaagatcctcagcgcaagcttgcgcataactatagtcacgctgtagcttcctgcgtcactcgtacgcagtgcgctcctggatactcgagggcctgggtcctaacattgcagagaccgtgccgtgcgcgtcccagtcgtgaaccagaaaaaacggagtgtcctggcgagtggcatcgaacgatgtattcagggcaaacatcaggcgctcagcatggtcgtcccagtcactctggtccgcctcagcaatgtacgctcgaatgctgcgcacgacagtctgtaccgaccgctcctgttgtccgttcgcctgggggcgatactccagagtggctcgctgcttgctacccaaaagttcacggaagcgcgtgaacacctcactcatgaacctggggtcttggtcgtgcctcagcatcgagctcgcgccgaatctcctgaagacctgctcttcgtacacttcagcgacatcttgcgccgtggtggatctcatgggtttacacatgacgaatcctgagaacgcatcctgaaaaagcagcaggaacgtgttcccacggtccgacttaggcaagtgtgtcgcgaaatccatagacacaacttcaaaagggcgcctcggttcgatgttcccaggggaaggccctggattctgggggcgacccttgccgctggcacaatccacacactctttgacgaaaacttccacatcagcgtacatgccgtgccagtagaactcagagcgcagctgctcgtacgtcctcgtgatcccctggtgcccaccccgaaaatctccgtgagcgtaatgcaggatatccggttgcagagctttcggcaccacgagtctgagttcgtcaaccatatctcggggtcgatctctggtagaccgactcaagcggtacaggacttctctggaatccaacacgaaaccatcagcgaccttcgcgagtttcctggcttgagcgtgcgacagcttcgtcgtgtctcctttcaggaaatacttgagttgcagctcatctttgtcctggtgcactttgatgcgtcgccagcgttccgcctggtactccagaggtcccatgggttcgctttgggcttcgatctcctgagttcgcgcccgagtcattactgcaaacactttggccgccacaggcaacggagcgcactcaggtccagggatacccagagtttcgacaccctgagaatcactcccctgaattccaacgttcaataacaccttcggtcttaccaacttctcgtgaatcttggacaccaactgcagatgtgttcgttcgtcagcatcctccaccttctagaattcaccaagcgcgagggtcttaaacgtcaggtagtctgcggcctggttaaactctcgcttgacatgcaccagccgcacagacttgagcttcgtcttcagcacttcatactccagcttcctctggagatttggctgattgcagttgattagaccctgggcttgctggatggcaatcctggagtccccaactacaacgatgtcctgaattccacgctcaatcgccagagtgaggcccttcagaagtccatgatgctcagcgtcgttcacagtcacgtcctccagggtgaatccctgggcatccaggatttcccacccggggacatgccataggatgcagccgcagctcccttgtcgcgtggaagtcttagcggcgccatcgaaactcagaatacacccctcgtagtccgcttccagcatttccatactgataggcactggaggtttaacgcgccccttagctgggatcaggttttcagcgatctcatccaagtgtttctctgagggtaatacccgcacccagaattgcagtcaagccgtcttcatcccgttgaactctgcgtatctccaggttccagtgggagaacttcagaccccacttcaccgttcggccgtctgccgactgcgaggtcagcaaccacttcaacaccgaatatcgcgtgtagacgacgatcttagggctaccttcaaccaaagtgcgaaacacctccaggactctcaggatagcaatcacctccttttccgcaatgtgataccgcagctcagcgtcattcaagacgcgacctgtgaatcgaaccgggtgcacaatcccgtcgtactcctggcccaacacgggtttgcgtggggaataatcacgaagggccttgaacgatctggatgtctgagcaacggagtcgaaacgatcttgcgcttcaagatttcaaaggcttcctgggctctcgacaggtctctcctggatttcacttgttcctcagtcagctcgtacaggacggccgcgatcacgggtagatcttcaatgaacttgttgtagtaattcagactccccatgaaactctggacgcctttcagtgtcgtcgggaacggcaagtcttggacccccttcgcgattttaggggtcgcttggatgccctcagcactaatctcgtgagagaggtacggaatggacaacttcccgaattcgctcttgggaagactcacagagatattccagtaacgaagtcggaagagcagcgcgttcagatcctggcacagctgctcccaagtaggcgcaccgtgggcgatgtcgtcgatagacgagcttcgacccaggacagggcccatctgagagggagccgggatgttacgctgaaaaacagtcatctcatccgtcaacactgaaagtcgcggtgcattttcacctgaaactctgggttccccagagttgaaccccaaaaagtctaagacatcttggtcgacctcatgacctctggggttccgacaggctgcgaggcaacatcggtcaccgcctccttcagaacgtcacccaagtcactcgtatcaacagcaacatctcggagttcaggagggtcttcaggaggcactccttcagtctgagttgcagcgtcttcagcgaagcgcacgcgacgaggcttcggttttctgagaatcgaggcaagcactgccatgtcggggccctttgtaggttgcggcagaatcttcgtaggccactgatactctggggtctcgacacaggatggctcaagcgcagccaggcgttccgcccgaagtctgccctcgcgcgactgaacactctccagaataagcgtctgccactcccgatacgcaaacgaaccagggcgcacaaagcgtccggcacgtgggaagtagccgtactccacaattcgggcgactggcgttctgttgtgaatccagacgtccttgtccgagatgttgaccaccttcacggcgaccggccaggatctcgcagcgtaaatcaggtgctttacccagcggtcacctcgtcctgcccacacaacctcacgctgtgggttcgtcggtccatacgagatcttcaccaccttggattccccaggggccaggtaccaactacctgtggtttccacgggcatgtcgacacccaggcgatcctctggagcccatccacacatcatgatcgcctcttcatccggaagtgtcacgagaccttcgcgaacactgatcctcactccagctgcaaacatgaaactcatccccagaagaacttcgatcccttcgccgatgttagcaatccagacatccaggagatatatcaccctcgaaccgagagtattcttcacctgagcactggcaccgatgtacgtcggaacgcctcccataccagacaccttggtttgcttgtgcgacttgagcgtgagtccgagcttacgcgctaagtcgaagctcacaatattcacagtcgcaccggtatccaggagaactctcgtccggcagtcgttcgcagcaccatgcaccatcgccacatcacgtttctttgggtcaggatcattgttttcccaccatccgtagcgctctctagggttcagcttgtactccacaatttcttcagagttcaccgaccccgagttcgcttgttcaggatgctgattttcagggggagtcatgaaatcctgagtcaaagtagtcatgcattgttggttatcctgggttcttgttctcagctccgggcctacatacactagaacacataactctggggccttcttcagcccggcgcgtactgggtccccacccggcgggcttattggtttgacggcctcccagagtttgcttcaccatccaggagtttatccaggatttggctcggcatgtccttcagtgcaccttggcgggcgagtttcttcacagcttccagtgtcttccagtcttcacacggtttcccgagatgcagtttgccacagttctcgcacggttgcgcgcgacacaagtgagtcggatgacccgcttccaggcagcgatcacacttcacgtctttccagcagttttcctctgggtgcccccacttgccgcacttctcgcagaacttgtcccaattcgggttttcgcggcgaggggaacggaatccagagttcgcgttcggtcctggttgggcgttcggtggacgccatcccatgttatccatcacgcgatagacctcgttcgtcagcgtctgagtccactcggcacccttcatactcgccagactcccagcgctaggcgtagaagcttcttctccagagatctcacgagttgaccctgaattcgcgctcgcacttcgggctgaaactctgggtttgtccgtggtttcctggaaacgcgcgtgaatttcagggtcttcgtctgactcacagtcagagacatcgcccctagtcacatacgcacgtccttgtcgcttcgtcttgaaacgtccctgaggaatgttgtcggcacgaaaggtacgaactctgggtggcggaacatcatggtcgctgcggctccagacatcttcgtcctgttccagagcgtactctagatcagcgatactcctgaatttctggccctgcagcgacgtcttgaggcgcgtgcccctgagtttcgtgatgaatctccggatgtgtttctccaggcgcttcgaagacttgcgaaagtcaatgtcagccttcccagcggcggaattcagacgataaaagaaatccagggcgctctctgagttcttcatctccatcgtgaagtatcgttcagagtacgacgagcgcgctttgcagtacttcttcctgaatgcagacgccaactccttccagtcacgctgagtgtgtttgggcaactggttgaaccagtcacgcgcagctcccgagagtttcaacttgtgttcctgaattcgcatcttcgtagaccaacctccctgagccgccatgttcgcaaaacgctcccaccaatgcacgcgttccctgagtgacgccttagtatcgaactcacccagagtattcgaattgatgtacggtctgaacgtcaggagcgtagtgccagcttgagccgtagagaccgtcgtcagcttaaccccagggttcccgtccgaactgtcttccgaactctcagaggacgagtcatcatcgctggaatcggagcttgggtctgagtccgagggtggattgacatcctgacgcttcatcttctgctgctggtgtttcttgggtgcagagcgcttggagtcttagaggtcgctgttctcctcggatccgacgtcttcctcagagacacaggctcgagcttgacaacttgcgtcaccttggtctccgtagcgccatgtccccgctggacgcgcgcgattctgccggaagtgtcggcggaagtctgcgcgagggtcgctcttagctgggaggcggcgagattcggaagtgttcttcggatcagctgtctcccgtctctggcctgtgacacttgcgtttccgttgattacgcctctggattcttggggttgggttgcaacttcagggttctgagccactgacgacctcacatttgttgccaaatcaggggcgacggttgcgcgacgcgcttgaacttgggccaatgttgcccgaaggtcgcgcacttggccggcgtggaagcgctggatattctcggaagactcccgctctcgctctttctccgcctcaagttattggaccttctgctccatagttaacatttgttccttccaaccggcgtaggtctcggaaacccagcgcgcgcgctccgagtcggcttcggcttcgtgccgtcgccagcgctcggcataggcggcatccaggcgctcacgctcaagacgaacaacttccgtgatactctgggtcatcccctgagtttcagtggaactctgggtctggcgagcctccacgtcctgcgcacgccgttccgcttctcctcgggcgatctcagcgtggaccaagcgatccgtaagttcctggttctggcgacgcgcgcccaggtcacgttgttccctgaggcgctcgcgcttcaaggcatccaggcgttctctggcgagaaactcgcgttgctcctgttccatgcgggcctgccactcctgctgttgtcgcaagacgttcagctcgatttgggcgggcccagacctcgcggacacggacgaaactgacccaagattcctggatccactcgagcggctcgacgcaggtgattttctgggttttgtcgagcgtcgagagcgcacctcgctcttagagctctggtgttgactccgctcatcggcgctgatatcacttggaccaccaaatccagcaatcggggcagaaaccctgagtttcggctcggaagtcgtggctgaaatcctggggagaccggccttcctgggtgcgatctctgggtcagagtgcatcgacgacgccatctcaatgtcatcttggtcgactgacacaatacgcgacgggaggactgtccgggtgacctgaaatccaagatcaccggcagctgcaaatccaccggcactctgggccacaagcgctagagctccaactcgttgtccaagcgacatcatcgacgaagacgaagagctaccataagacgtttgaacgcccgaggcagtactcttatccgaagcgcgcgaggtaccgatgacacttggcaccgcgcctggggtggcgtccttggcttccgcctccagagaatcacgtccattggacatggaattcaggggagtggaattctgaagcgaggcaccagtcgaagacttgtacgctggaagagagggcagcgacggtgtagacagcgcggatggcgttgacgggacttgtggccgaggcggtccatgctgagtacgcttggatcgttgctcaccatcactcgaccctcgtgggctccgtgaaatcctgagtccagtgactctgaatctcaggacaaactgtcggcccagtaggtccgcatcgtagtccgtcatcaattgatcaccgtctccatcttccttgtctcggtgcttgctcttgggcgctttgtgcggcgtgatcttcagagtttaccttgaaaggcacaccagctatcaccaatctccactcgaccagttccacagcgatgaaattctgggtttcctccatgacagagcgcaccagactttctggaatcctggaagcacgcgtcgaagaccagccagggatcaaattgacaaactcaaatccagcttcgaagaacagagtctgcagaatggcgacgcactcgcgggtggtcatgatactctggggaatcgtagtcgccatgagatcctgagcagttccgacgccccaccgggcgaggtgaaactcagagatccaggcttcatcttgattctccagagacaaacgtcacttgaggtagtctcctgttgcgtacgcggccacgaagtacgagttggcacccggtttcggagtcggccactcatagacgacacttggcggcgtcaccttcccaggattcacctcttcccagcgtcgaacttcacgtcggacgtacagcaccatgctcccggcgtccaacgccgctgctcccgattccggagcaggcgcagcaacttcccggatgtcgctttcaggcgtcttcctgggtgccgcttgcgaacttggcgctgaaactctgggttcaggtggtgcgaacccagaattcaccctggaactctgagtctttgcctcctccttcgctcgcacgggctccgacttcgcttccacaacagactcgtccgaagatgagaccaagtcaatcaactccgggggctcaaccgcattggcgcctccctcagacgcctgagcaccaccctcgcgggtgtgctcctctgggacttcaggaatccgcgacccacaattcatctccgtcgaaccttggaacccaggggaaacttcttcctcctgagtttgcgatccagcagcaggctgaccttggactgcagacgcctcgacgtccccaccttgcactgcctcgctctcgcgagcagccttcttcgccttccgagcgtcgcggacgactgtttccaggtccttgtgctcctcaggctccataccttgaacacgacgcgactgacgtgacgcctcaccgcgtcctccgtcaccgcgtccactcttcttcgcccctcgtcctccaggcatcttggtagcttgaagttgacgggcactcaacacttcttcaacacttgattccggtgaaatcctcgacaatcgaatccgggcacgcgcaccagctgaggcgaggccgatgaaacctttgtcgcccaggggggttcgtatagcgcaccccaagactgttccccagggatagacccagagaatcgacttgagagtcaacagcaagaagatagacccagagattcgcagccgcaaagctttaaaccctgagaatcacactccttggttggcgtgggtaccttgtgtaatccctgtcggctcgtttgtcttcgacggaacggcactccaccagttgaaaatgtagcctcgaagaagtgcggggccgcacgtctacttcagaacgcacctccacaccaaaaggcaaatccagagaatcagatcccctgaaacccagaatatcacgaattcagggtccaggatttcagtcaactctgggacttggaactcagaagacaccttacccgaatgccctcctagctcgataaaaccaacaaatacagtgtatacaaacactgcaactagccgtcacttattcttttggacccttggacggtgggtcacacacacactaggctcactcgagtctgaaattcaggggcctagctcccctgagactcacacaaacgcgcaccacctccaataaaggaggaaaatacaatcactatcagttaccttcccttcacacaagcagtcaatacaaaatcctggaggcgactacctagcaccccagaataccctctggaataatatgaaatgggctaccacgagcacagcaagtgacccaactaggatatggaatagatggatcaccccaggaagctcaaggccgtcgctggtcaccacctaactggacttgagtttgatggagcccacacagacggctgtccttcgccgttgatgtgcccttagcgtcccgcggtcgtagtctcgggtcctccggatttccgtcggcaggcttgcccgaagtcacttgcgcagtacagggtaaaaggaactctgtttggtttttatcaactacttctctctctctcttcttcgggcaaatatcttctgttcactatgcttggggtcaaaatgtcttgtcttgggtataccttgggatcagcggtccaaacttgcgatcggcttgcgaatccattgtcgcacggcgtcggaagtgccaattgtgggtccttagacttggtttagtatggtgcaggactccctctcgactcctcgaaagtatccagtctgcgcatccacaacggttcttcaaggtcacgcatcactttgattgcagactgaccgcgaactgactcgaatccctgaaaatcaggtgacactcagggtcatcttctgaaatcctgggaattctgaggaatcttggggaactgtggggattcttgggtgttgactcgggaaacacttaagttcaatatagagagtctggatttatggtccaaacccagagaatcatctttggaactctgggtcacctgcactcagggatgtgaactctgggtcatcgtgcggcactctaggtttccgtgcggcactctgggtaacaagtctgctgcagtgcagactcgtgtgtatctcatcaaagccacacttttagtgggtttagcggcctcctgcgcatgatcatggtagtagtgggttgattctcagggtaatttgatcctctggggcactctgagccacagcaagatgaggcgtactctggaatacattctccagaaagactttccgccagactttaggcactcatcgtaagggaaagtccgcggctggactgagtgttctctggaattctgggcgtgcactcccaggattcacacttccagccagttgggcccatctgcggtcagacgctggattcatcccgagaaatcacttctctcccacagtcgccatccatgtcacacgggtacagccgcgccgtatccaagtcatccaccaatcagcatccgatacaaactccaggtcacagaggtgacggcacatcgtcggcaattttctggggaccgcctcgtgtcaatcgaatctccgcgtcgttcagtatgcgccccgtgaacctcacaggctggatcactccatcatactcctggccgaggaccgcgcaggcggcccagcggttagcatgcggaataatcacgaatggcttggtccggtcggggtgtcgacacgatcttccgtttcaagatctcgaatgcctccttcgcccttgacagatcccggccggacttcacttgatcatccgtaagctcgtacaggactgcagccacaaccgggatatcctcaatgaacttttgatagttgtgatagtaattgaggcttccgaggaatgactgaactcccttcagggtagacgggaacggtagatcctgaacgcccttcgtgatcttcggagtcgcgcgcagtccttcggcactgatctcgtggtagagatacgggatactcaacttcccgaactcactcttgggcaggctgacagagatgttccaatagcgcaaccggaatagcagcgcattcaggtcatcacacaactgatcccaggtgggcgccccatgcgcaatgtcatcgatgtaggaactccgtccgaggacaggtcccagctgggacggcatcgggatgttgcgttgaaacagagtcatctgctccaccaggacgggaacactagctccagccttctcccgttcggattcatcccggacggacgggtccaaaccgaggaactcgagtacatccgggtccacctgctcttcctcttcccgagggagacgcacgaaaccccaaaggcagttgttgatcaccgcctgatacacaagtggagcattcttgagagtgtccgaatgggcagatgaacgcggagattggcttcgcacgttccgtcatccggaccgcccagaacccgctcgccatgtccagactcatgaaccacatagctgcttcgaatccaatcaggagatcatcgatcaggggcaacgggtagctagaaagccggatgaacccattaaccacccagtagtcgatgcacattcggatggccacgccattcttcttgaggacgatcacgatcggggaagcccatggcgacagcgacatctcaatcagacccgtttccagcagcttcttcaggagctcgtacaccttcatcatcaagtgaggggcaatggaccttggtcgttgagcaacgggttttgcgtcacccacatccaggtcacacaccacgcccctggccggggccggcgcagcattgtcatccccaaggaagatcttgcggtgatacttgagtatagagcgcaacttctgttccccatccggggtagtccgcccgggctctccaacatccgccttgtcgatatcacattcaggactcaggtccttcagctcaggaagcaaggccaattcgtcacgcaactgggacaacaactcgctcctctcgtgcagatacactccagcttccaggtcgagcccacctgattgattcgcatgcatcgattgtactcttcctccagcttccgcagcggggtactaggcatcgacgcagtgggcatatcaggctcttcccggtcggagatatcctccgagcggtcaccatccaggtcggactcggccagatcagagatgctcaggttccactcatcagaactcggatcagactcagctgcagtgccgacatcgctgtgagcgtcctcgacagtcggacgtcgaccggattccgatttgttatcgtctccattcgagactccctcgacggatcccgcctgggactcagcgttaccctgctggagcatcaccagccggtccgtccgggaccccgactcgggccgtaggagaatcctggtcggccattcccggtgcggtctttctacagctgggggctgccgactcgactcgagctcgagctgctcctgctcacgcgcctctgcttccggagacactgtgttctcgtagatcagctgttgacactcctgataccgtttgcttcccggccggacaaatctcccaaaccggggaaagtgcccgaactcgacgatccgggccacaggagtccggttgtcaatccacactctctgcttggagatgttcaccaccttcaccgaagacgcccacgacttggtagcatacacgatcttggtgaccccggccggcccacacaacatcccgttgggagttgctctggccgtacctaaccttcacgatcgcatgttcccccggacggagatagatcccctcatccggggttaccgggagatccaagcccattttgtcgcgacgcggaccatcacacatcacagcagtttcttcgtccgggagctgcactagtccttctcgcacgctcaaccgcactccagccgcatacatgaagttcatccccataagtacttccaatccttcgccaatattcgccaaccagacactcatcacatacaccacgcggaatcccagagtgatcttcacccgggcgtacgacgtaatgttggtgggagcacctcctaatccaaacaccctgatcggctccgccaacatccggaatttcagcttgagcctacgcgcaaggtccaagctaatcatgcttccagatgcaccagtgtccaagggtatcctcgttcggagatcgttcaccgccccatgcactgtcgccacttcatgactctcttcaggctcgtgatcctcccaccaaccgtatctctgtccgggctgtaggatgacttcgacttgatcatcgctatccgggttttcccgtccaggattcgtacagttggggtcgtcaaactggtcctgaaatatacctgacatgcattggtggttatctggttttctccttctcaactcgggcccgacattaactaagacacacaatcctttgggtttcgccagccaggcgcgttctggatccccatccagcgggcttattagtttaacggcgaccccggattgacctcttcacccagcagttgcttgcgcaggggtggaggcaggtcttgcaacatccccttccgagcgagtttcttcacggcttccaaggcgtcgtaatctccacaggttccttcatgaatcttgccacagcgtgagcacagcttcactcgacacgcgtatcccgggtggcccttccggttgcaccggtcgcaaacgatctccgcccagcagttctgctctttgtggccaaacttgaggcacttttcgcaaaactcgttccggtcagggttttcccgtcggggcgactgccatccgggccgaggtgattgccatcccggccggggcgactgccaccctggacgggagtcgccctgcgtaggcgggcgccacccactctgctcgatcgccttgaagatagcctgacggagttcgggctccgggatctgagcaacggttggggctcttggcgccacctcagcccgggcactccggctgggctccttcgactccgcttgggacagcttggcttcctcgacttcatcctcgaaacgtacacgaccttcatattcgtagccgaactccccgtccgaagttgccacaaacgcgcagcgcctcggcttgaaacgggaatcctggatgttgcccgctcggaagtcccgcctgggcggtagcgtatcatagcccccatccaggttcaggtcctcctgttgctccaggatgtcttcgaggtcgtccaggctgcggatcttctggttagccaggattgccttcagctgggagtcccggagattcttcaggaaacgcttgacatgttgcttgcgctccttcttggacttccggtacttgatccccgccttgtccgcagcctcgttcagtctgtagaagaactccatcggggtctctgacgtcttctgtcgcatggtataataccgttcagactccgacgtccggagcttcaggtacttgcgacggaactcctggacgaagcgcttccaattgctctggacgtgcttctccagttggccgcgccaattccgggcggcaggtgacaacttcatcttgagctctcgaaccgtggtctggtcggaccaaccaccctggacggagatgttggtgaacttctcccaccaggtacgtcgatctccaagcggggccttctcatcgaactgacccagcgtgctggaattgacatacgggcggaacgtccaggaggtcttgccatccccaacagtagttgactccacggtcggtgtagcgtcctcgtcgtccaggctgtcgtccgagctggagctatcatcatccgagctcgaggaactggagcttgaatccggggacgagtcgcgatcccggcgacggggcgccttcttgcgattgtccttcctgcgctcgtccttcctgcgttcgtccttcctgggcgggtccttatttagctccgttggttccttcttcaccgtcgtcttggtccccggacgggaggtccccgtcggagaaacctgcgtcgccgtagtagatcggtgtgccgcattaactgcggccggctcattcttcaccacggtcggcttcagagtccttgctagacgcgagacgtcgacttccggcagtgtcgccagtagctgctcccagccggcttcggtcgtattcttctatcccggctgtgcactcgggaccgttgcgtttcccgtgattacgcctgttgcccgttcagggttgtcacttcccgtttgtatgggagttgcccgattagggtcggatgttccccgttcaggttgagcttgggcagatgttgcttgaaggttgcgtatctgtcccacatggaaacgctggatattctgagcagactcacgttcctgcgcacgcgcgacttccgacgcctgcagcctggctgccaacgcggccaggtcctgctgggcctgcccggcccgggcggccatctcggcggcgtgcttcgcgtcggcttcggccagctgtcggcggatgtactccgcggcggctgcctccccacgctcacgctcggcccgcgcggcatcaagacgagcagcttcgacatcggcctcagccgtcaaggactgcgaggcggcctgggacgcctgggcgtagacctcatgcaggtgtcactcaagctcctgggcccagcgctcggcttcgcgcgcctcccgttgggcttcggtcagagcgagctcggcttcggcatcccggctgggatccttcccggtcgacacagcttcgcgaagcttcgacagttcggcaccaagctgctggacctggtggaaggtcgacaccaccatctccgccatccccgactgggccgacaggcttatccgtccggaccgggtggaccagtacgagcgcctggatggggatcggtctcgtgatgacctccgcttggaacgtcggcggcgacgccgagcatccccatccgagtccgagccactcgacagcgagtcacgccttgagcgtcgttgcgtccgggaccttgtcgacgtccgcgttctggatgtcgcccggctggccacttcgtccaagcgcgccatcttggcatcggcctgatcggggaccggctcacgtttggggatcacctcgcgcgtcacgtagaagcccacgtctccagcgccgaccgacacgccgaccggaccccgggcggacatagccaaagggcccaactggggcatcggcatgtgcgacgcagcgctatacccgagcgtcgaggtcgacgagtccgaggtggtgtccctggacacatacgactcggacgtcgcgccgtaggaagcccggccggaggtgccaactatgctcgggacagggtccgaagttgcacctctggccggggcatcctgggcagactcctcagacgacggaaactcggacggcagcgactcaaactggggcggtggggacgcaagcgagctctcggccctcggtggcgcatgctgcggacgcttgggcgcaggctcaccggtggacgacccgctcggactccggatgggacgaagaccagtcaagcgtaggcgtaggacgtaggtccggcccagcaagagctcgtagtcgttcatcaatagatctccacccgcgtcttccgcgtggtaatccatgatcggcggcttctctgtcttcgcttgggcatccaacgctggcaggatcttgaacgtcgctccgacgaccagctaacgccactcgatgagctcggcagcaagcagtcgctggacatctccgaccagagtccggatggaaatcggctccaccttggacactcgcatctccacccaggtcggcaccacgttaacgaactggaacccggcctcgaacaggagcgtctgcaggaccgcaacacactcccgcgagtccagcaacccagtcgggatctggactccagccaggtcttgggcagtcgacaggtctcgacggctgggtgccaggtcggccaaccaaacttcggtcgggacctccgaggccaccttggacgccaggtacttggacgtcgcaagcgtcgcggtcagccacagcacggagtccggacgggactccggccaggcgtactccacgttcggaggaagcgtgagcccagaccgggctctctcccaccgggacgcctgcaacaccgcgtacgtcttcgccgcttggacactcgggtgctcggccggcaactccgtcgacgggctaccccggctggccttcaccgagagttgggtctccggttgggcatcagcggccggggacaccgccttcgcagggactgcggccggcttgtcctcgccggcagacggcgtcggcttgggttcggcggacatcttggccaggcagagaggagtcccaaactcgaccctccgcctggggctcatccacgtcggcgcctccctcagacgcctggttgggttcaccctggccgggatccccctctgcggtcttcgactcctcgcccgcgtcagcacgttcgggctcgccgtccttcgacacttggtgcgcgtcatctgggacggccggctcgggtgccggctggacttggttcgaagacccatctccggccagggccgccttccgattttcagcgttagccctccatgcattgcgttgaacctcttccaggctcggttgctcctcgggcggcagccccgccgcacgacgcgattgatgcgacgcctctccgcatcctcgtcctccgcgccctccttcgcgcatgtctcctcgcttagctgtcatagacgctagttaggaaagttagcacataaacttacaaaatataaacaaccccggtgaaaacccttagttcgaatccgggcacgcgcaccagctgaggcgaggcgggtgaacgcctgaccgcccaggtgtatagcttggcgcgtcccgggtgtagactcccgaatggggtgcacccagaacaaaccctagccggagatagtacacctagatgtacactccaatcggggtggcgtgtgtccttgtgaacaatccctgtgggttcgtttgtcttcgtaaccaggggtcttcaaccgtggatgagttgtcttgatacttgtaggtcgctaggtagcagggcagaacgtaaccttcctggacgtcgcctctgacagccctcagataaccaaacaatacaaacagatacagagttatatacaaacacgtagcccttccttattcttttggaccgtgaaagggtcgatcactactccagtcaactccagccggactccgggatactggtcaatcccggtcggctttggctcacgcgcaccaccctcaagtactgagggaaactaacacaatctaatacctcgtatcacacaatagctcttaaataaatacttcccacccggggctactccaaccggggtgacaaggtaatcggtaatatgaaatgcggggccttcctggtctggacgagctcaacggcaactaggaaatgaaatgggatggatcaacctcgggttgtcgcccggtactcaccccaacttggactggacttggttgcgggagctcgacccagatgtcacagtcctcacgcgtagacttagtcagtcctccgggaatgcacgtccggtaggctgctccaactcacttgcgcgatccttggcaaaacgaactctgtttatctgttatctgtggtctctctctgtctgtctggctatcttctgtcgatctttacatgcactccatcttgacttgtcttcactatggtcttgtcgtcgcaatcgtccgcggcccctcgtaacatatttccagcaagtataatcatcactgggtacgcaagcgaaattcaattttgcacggaatccgaacagatcttggctagtgtcggaaacatcttggactttgtatactggatcttcacatctgggatgggatcttggtatcttggtatctccattcgggattcatgattatctccaaacgggatcacactccacttgggcttcacatccgggatgtcttggacagcttcacggtttctgggtcttcactcgatccgatcgggctcctcttgcgttgcacagtgcaccaagagcaggcggcctccagtcggaggcacttctacgctaccttgggctttgcctctcgttcagtacttggttctagccggggtccgctcttggggacatctccatctggggtcaccaaaccttgtacactgccaacgcaagtccggccgggatccgctcttcccatacgccacgtgtcgctgcctccctctcccatagtgagcctctgagccaaccaatcacaggcgcggctcggggaatcctcgaaaatctccaattccatcgtgtcaggcacgcacaacggcaggtatccagcggcaacgtcgagtcgacgttgaaggacggaagcaggacggcgagcgggcggctgagaggcccgcacactctaagattagacgactttggcacaagtggtcagggtgtgcgtgctggagagcacgtagaagaaggtgaacaggacgtgctgcacgagcgcgaccgagaacgtgtacggagagagcgatatagagccgaaacgctctgttgctacgactgagggcggcattggcacgaacgagcgggtcgcaggcggtactcgacactatcgtgagcactcggacagagggtctgagctgttcctgggcgcgtaatgcgggatctgaggacggtcaatggtgtcggtgcacgtgcagtagtagttcggacggtagagtagctgctggtgaaaactagtgtctattatttggtattaggagtagttcaggctattcctcgtaataaaataggagcggacacgacggtggacgttccggcagggggagatcaagtgatctctgacggccagtacggtgttgagaagtagacgactcgcgtgcgaactcgcaccgtgagcatacgacctgcccagcggctcgggcaagacaagtgagcccgcttcacagcgaacataatacatttactggttgcgtctgacgaaccagggcaccgagatggcttacaggtccgatccagttaaaaggggtgtctctacgtccgtcaccactattggatgttcaggcagcgggcggccacgtctgacgggggctgggacttcgactatgcgaaataccagcgcaccaagacttccagcgagcacatgaacggctctgtaacggcgtggactgccgaggactggttgcgtctgacgaaccaagcaatggagcaggggattgacgcagggaacgacgagaaggctggcgacaagaacgaatagaacagtagcgaagagaacgccgagatgaggtggaggaggtgctagggtgtggacgcttctgcggatcctagtttgcatattgtttttccttttttgtggggccttttggctccttgggctgctaccgcgggagatccccgtatgcggtgctcctgccgtgcgcggctccgggcgtagccagccgaaataaccgctaatttcatttcatttcagtgcaacaacgtaccggtgtcggccgcaaagacgaccgagacgggggcgctcttgaccttgccgacgttcgcttcgatcatgccgcccgccaacttctcacggtcctcctcggagcacagcacgatcgccacataggccggtgtgttgatccggtcggggctcgctacaaacagcaccacttcctttcagcagcgcatcgatttagttcgtggtagattggtcacgcctgtgtgagcttgagaatctcccggagcgtctcgtccggcacggggtccaggccctggactccagggcagggaagacttacaggcgaagcgctcgcggatggcaactcctggttgttgggccatcttgtacataacatgtacttgtgttgtgctgtgaaaagcgaatcgaaaagtgatgtaggaaagaaacgctccgagcaacacaggacataatcaaagtgttcgtgtgcgctgagcttggaagcatcgccgcgcttgtcgattgctaccaagatcatcaactgcacgctgtcacaaagccaaaaacgagccacaaacacgaccgagaccacggagcacgtgtagccatcggataataccaaccttggtcaccaagttgctgcggtggactccacatcgaccgaacaggaccgcagagccgatccgatgttacgggtgtggggaacctgcaacgcaagtgcgaacacaagaggggaggtagaagcactgtgagggtttcaaggcatgaagacggacactttgggtgttcgattaatgcatgtaggcttctgtaggtataaaaaccaaaatggaaggccgatctcactcaaaaactcaaaaacatcaacatgtgctgtcgttttcgcagttaggtacatgtacattgatgtcgcttgaattctaacgagtccctatgacgcatccggtttcgctatcgatgctcaaaggaaacgagaacaattccatcagcggccttccaatcactgcacatctaacgcgatcatatttgcttcgggccgctgttatgttttccactacattgggggtcaaacgaagtttcatgaatgagagcttatgctatgaccatcagctcagtccgataagggacgaggagagcgttgcccccaaatggtcatgcaatcagccccactaatgcaacgtcgaatcgccccgcggacctgttaccatgtttgccgccagagtagcaaccgactccttgcagggtctggtgtaggtcttaaacgcatcggaaccccaacggccgtgaaactggatcgtgagtgcatccgtgccagctcggtacatgtgggttgctccgcccgctcgtagagaatgggagctgaaacagcgtgggtcttcgccagtgctggtagccgcccgcttgatagcttctgacacatcatccgtcgcaatgcaggccggttttccgcagcggtccaggaacactgcagtcggtatatcagtgggtaggtgtttccggacttggagaaggatcaaggcaccaaacacggggcacaagaatgggtgtcccgagcgcgacaacatcctcgttgtaggagagccgccttggtttgtcttggagccgatcaggcgcatacacaccgactgtgccttcgatggggacagggttggctggccttccgcatccagaaccgcgatgtcttgagctcgaacagcaaaccacttgaacgaaccgccagtaattgccacgatttccgaccgccgaaggagaaaaaagaacgccaggcacatgacgccccagagggcttgctcgaagggctcagtcattgaaaggttgcggaagcacacctcgaggagtccgattgacactggtgctttccggcgcggaggtgaatcgagacggctgatgcccttgagcagcatacgaatgtgcgggtgtgcgatcggagagtcatgaccggatgccgcgaagaagtgccgaacaccgatgagcacggccatgatcgcgtcgctgcgaatgggacccccggacccgaagccataccgcaagccgtggagaataaaatccgagatgtgctgcacttgagcagcgagaggcatgcccaaaagcgagggtgcaatgccctggcgggacgtccaggtcgtccacttggtcaaggctcggcggtattgctcgaacgtggagtcggcaacggagtgcgctcggagatacgctgccagatacgatcagaccttgaatatccactgtcggcgacacctgcgaccatccgggagttagtgacgagaatttgaccgcatacgatgggttagcggcaatgcgggagccagcgtcggcgcgttcgttgtcagagccggccacgtgcgacaccgaaaaccgaagctggaacgaagtctcccaccagctaagtaatcggataatcacttgagcgcgtgaattacaggacgcgagcctgttttgccatgcgaccgcagaagtgttgtcgatgcgaaattgaacgtggcgtgggcgatcgttgcgcgaggcaccggagccccaccggcgtccccatgcgtggaccgcgaaagcgcacgagagcacctcccgaaagttgatatcgaagccgttgggcgtgtcatccttaaaagccgcaatcaaggcacgctcgctgtccgagaactggtacgtgagggccacttgcgatgatacatccagcgcgcagaggccataatcggacgcatccatttcgactacaatatcgggtactggaagagcattgaagtattccagcgacacgccgttcaggcggggagtgtggagcacacaccaccaccatatcaggtcttgttgcatgtccggcgtaatcggaacacgctgaaaccgctgaagataactttcgcgtcggcgcagacgctggagaaacggccgtgcagcacggatgcatgttgcgacgtgccggaggctacccatcagcgaccggtaggcttgccttgaaagtgatgaagcagagtacgcagccgccacaatactgcgtgccttgattatcttctccgttggcatcgagaccgtttccgccaccgtgtcgaaaatgaggcccagtacacgttggcgcgtgttccagccgtgaacttcttagtgttgatagcgtcagctcccaggactgctaccatagcgtaccgtagggaccgatcaacgtcctcgcaggaggtgccaatgtccgcagccacattgatgtggtcgtcaacccagtgataattgaagacaccacccgggtactcgccagtcgtgtgtgaaccgtgcacgtaagcgacagcaccaccagcaatctcgtagaaacccggtgatccagtctaaccgaatggcgcagcgagctcgatcacgatgacatcgtcctcctcgatgtggccgccgaaaagatacgcgctgttgctgtgaatgctgatgttgcggaaagcagacgccacatcatcagccatcacacacactcgggcccttgggtgagcgcgcttggacctcaggatttcggccgccaccgcgtcgcagtgagtgtactccggcttggtgatgctgtcctgatccgtgtagtcgttgatggaagtgccttcggggtatgacagatcgtggatcgtcctacccgacacgtttgcgtcctcattgcccttgttcaccaccccgaaggggctaataatctcgggccattgcttgaggagatcgcggtcgagtacgaggcaccgcccagcatcctgctccttgcgaatgttcttgcggagcacattaaggcgatctcgcgccgacccgtgatttggtggccgctgtacctgccgtggaggtgtcttgcttagccgaacttcaacgccgccctgcacgattctctggagctcttccagatgtgcgtaacccttgcatacttcgttcagcacgcctgggaccaggttcttgttaggccggttgtcatcggccgtctgtccgcgcatcagctccacaaaggctggcagtatcatgcccgactgtcgtgcatattccgatagcgccttttgcaacggggtgtccagaaggaactcgggtcccgccgcgcctggtcgcgacagcggataattgtccggcggcagcgcgatgccatattttgccatagcttgagcaagagtaactctccgagacatccgcagtaaatcgctccgggcacgggcgttcaggtgcatgcctgcagcggtcttgacgctgacgacggggcgcaggtagcttggccgcggcgcgatatcgttgcgcaacttggcttcttctagaggatggcccgtacttccttggtccggggtacacgatgccgaccccggcgagccgattatccgtgaggccggctgagtcgcagcgcttctcaactcactcccacgtggtaatggacacctaacatcttgtgatatagtgagaggtgacgctccacgtatttggtttaattggtgtaccggctgtatggccggcactggctgtatggccgtgggtgactgtatggtcgacccggactgtatagtcaaaggtagctgtatagctgtaggtggctgtatagccgacccggaccgtaaggtcaaagtgccagcgcaagcggtgctagctccgctggtgcccttgtggctacctggtgaagtcggtgttccggtggtggaagaggtcggacgaagggcaaaacaggtgctctcacggaaaattttccgctcgcgcgccgaaagtcgctcgagaagttcgcgtttgacgagccagcttccagcgacgacatctccgacgactccttgaaatgcatcacagtgagcccacgtgaccccagacgaccactgaagatcgccatcagcaccgaaggagtagcttgaaactttaccgcctccagctcccgcatccataacacaaacgacatcgcagacaggggcttacctgtctccgtgccgaatgcgcggaacatccgggtcgccgccagaagatgagcttgcggtgggttgtagtcgtccttcgccttcttcgtaccttcggggtagcttgatgtcgtcaggtaccgcaactccgccggcggcatctcccccttgttgttaggagccgtggcagccgaggggtctgcatgcaggcgtgacgtgacggcgacagggagctgagcaagcccttgcccggccaccagcgcacgcagacgttccacctcatcttgcagctcttgcaattgcgcacgaacagcaacgccgtcccgaggggcgatgtcgtcggtcgccaccgaggcttcgttgggggtcgtcgcgacggccgtgctcccatcgacgggcgcaacagtcgccacgagcgcagtgccgggcgagaaggaggcaatgaaggagctcaggtcgaagtcgctgtcggatctcggcgtcggcaccgcacgtttcgaggtcgtcgcggccttcgctggcttcgtcttcgctggagtcgtagtcttacgcggcttcttcgcaggcggcgccggcgccttgtcctccgagtcggagtcggagtcgtggccgccgtcggtcaccgctttccgtggtgcctcgccgctggtccctgccgtcggccgcttgaccagcttctttttgcccttgcgagcttccgtgagggcttcaccggagactaccttcgacgtcgcccgcttgctcgtgcggagcggggcggggtcggacgtgcgccttgcaggcgccctcgcccatggttcgtccgcgcccgtgacgtccacaacatcaggaggggctgagtccgcggcagcgacggcagtcgggcgctcgctgtccgacggggccgtctcggtcctgggcgatggcgagctgggggcgccggcttggtcggtggttccacggttgatcatgacgtagtcttgagaggttaaggacccccttcttgcttgcttgtttgttggtcttgattcgaagtgaggggagaacgccacgcgtccatcggttggactgtgggcggtcagggttaccggtataataccggtatgtaccggtatatcgaaagtactattttgaagtggaaaacacaatcccctggttctaccatggaatacagctgtatgggctcaaagtgcagtgaggtcacggtacgaatctgttccttagggcctcgcggcgcatcgtcggattctcctgataggaggactgcaacctgtgcgacagctgagcatgtagcaaccagttcaaaacttggacgacttacatcgatatgctcaacaagaaatatccgggcaacaccgtgacgatggctggggtcatctcagcgaagtacggagatgaagctctggcgaagatgatagaaccggctatgcatgtcccgagtcaacaaaggcttgcggcgaatttggtgctgcagcaacggaacaactgggaagccgctgtcaagtcggtggacgatgtcttcacgctgctccgactggacaaggcgggggacgaccttttcaaaacttcgcagataaacaggtggtacaactacgtgtacgctgtgaacacgaaggaacgaactcaatgatggtatcagccctaacggctaggttcggcgacgacggtcttgcaaaggtcctccttgcggcaaagccctatactacacgcaagatgaagtaaatttccgagcaactggaggctgcgacgcagaatgagtggctgcggaagggactcactaccgacgacgtgttcaacacgttcaagctgctgaagcttgacgacggcgtggagaaccttctcactagcccgatcttgggtgcctggagctcgtacttgaaacgcctgaacgggggcgttgatgaggaagcagcgatggtcaagacgttcacaaagttttacggtaacgaggcgttgtccaagatgctcgaggctgcgaagaaggtgtctacgactgaaacgatggcgacgaagttgcaaactgcacaattcaagatgtggctcaagaaccgcgtgaagccgatgcatatctggagcatgctcaagatggagaaggcgacatggatggccaacccgagcgcggaggtttggcgcggatacaacgcgttctacaaactgaacaagccacagtagtgcggattcgttggtgatgttacgagatggatgaactaagtaacgaccacttcttgtcttgagacctcgtggctcctgcaacagcgaggggaggtctagtttgtcgacgacgatattctttgcgatacatactaatgaatccacattgacgcaaattttctcaatacaaaccggttttggtgcaaaaaacatttgtatacgaattgaaaaaagcctgcacgagtttagtttagtttagtttgtagtttaaaactgaccgggatgcaccacctgtgccagcttcatatataccctatagcattaaatactggcgcttggttgcggtttagaacgtatctgagatacgttcttagttcaacttcttacccactccgacgccgacattcgcttcaacttgccttatacactcagatgcgcgtacctatcggtcgtccacaactgtactgaacatcgcctctgtgtatttgctcgcaatgtcgaaatggcatcggttcaatggccaagcgagtcggagacagactcacgagcaggtgaaatcagtgtgttggtgtctgtattacgtgtgaatgataacgtgtcacagccgtccgtgattgcgtattatcattccgcattccctgaccggagtggtcagagtgctttacggcaccttacagtactctgtgagtttacatgtcattcatgctgccgatccaactgtaaaaccaggtgttaggcatcgatattctaccggtagctccagtacactgtttttttttctagaggtgctgaacatgttcctgatgagcgaatgtgcatacgtcgaagacacgtgcacctcgaacttcgtacaattctgcaagaaatgcattctacaatcattgctggagtgcttcaacgaagcacgcacgcggtcggttgcactgcaactattacagggggggggcttccgcaagcagtgaccgaaaacatgtgtgtgcaactttctcccacgggactttgattacgacaactcgatagtcaagggatctggtcgagagcgcccggcactgcttcgggactttcgtacgtcacttttcaatttgcttttcgcagcatcccccccccccccccccaacaaacacacaagatggccgagcaactgggagctgcgatccgcgagcgcttcgcctgcaagtccttcctgtcggatcccgtgccggacgagacgctccgggagatcctcaagctcacgcaggtgagagacccagtctacgatgtgccgcctctgcaggcaacgactgacctgatacatgtatgttactgctgcacagcgagccccgaccggattcaacacgcagtcctacgtcgccatcgtggtgcgctccgaggaggaccgtgagaagttggcgggtggcatgatcgaagcgaacgtcggcaaggtcaagagcgcccccgtctcggtcgtctttgcggccgacaccggtacgttgttgcactaagctcttgatgtgggcgaagcaagttgcttatgttcgctgtttgtacgtgcctccagagcccagcaagaacgttgcgcgcatgcagcagctcaaccgcgacaacggcgcccccgagcctttcgtgagcaagatcccggccctcgtcgaactcttctcaggagagcacgaccccaacgtgtccacggaggcgtgggcctacaagcagacgacgttcgctgctgccaccttcctgtacgccgctcaggtgcacggcctcgccacgtgccccatggaaggcctggaccaggccaaggtgaagcaggcgttgggcatcccggaccgctacagcatccctgtggtggtggctctgggccacgtgaaccctgaggccaagcctgccaagccgtcggtgcgcttcccgccctcggagatcttcttcgacggcaagttcggccagtcgctcgagaagttcttcgacgagaagtaagtaagcaaataggcaataggcccgcttgctgtacattctagcgcttataagagaacatgaatccttggtgacacgtcaaatatttgctgcgtatggtgacattcacaacttcctcaccatagaaagctgcttccagtacagaatcggtagcattgttctgaagcgaatgcgacagtcaagtgaacgattgtattgaacagtactactacgccggatggtaacggagcctctgttactgagcttgttttgcatcccagccaaaagcctgcgctcggcttgctcacccatgttgcccactccatcttgagcattttccagatttacgctggttcgacaccatcctggacccactgcttaaattgtgtagcgtgcaacttcttcgcagtctcctcagttttgggcacattcctcacaacctcaagcatattcgaaaacgcttcatcgcagtaaagtttcgcaaacgacttagcattcgcgcggctctgatcgaatctgcgtctttgttgttcacacgaagtactcgtagttgtaccattacgtgttggtcagcggagtgtgaaagggggtttccccggcgaaaaagcttaacgacaccgtccgcagactcgcccccattttcccagcgacgtccgctgcagagccgccaaccttgccgccatacgttgctggctcggggtatgcatcgccgcttttatcaacgtcgccaaaccatcgccccggggtgcgaagcttgtcaaccgtctgcgaagtgtgataactcggtcttgatgaccaggattgcgtgcgtcagcaaaatcgtgtacaccacatacaaataattccacacgttgagacgcgcgcatcaaggtctcactatcgaactcgcgacaaggatggcactgcgctgctccccccgacttctgcgcacggcgacggccggcctgctgcgccaaggcgccccagccgcagcccagagccgctgcctcagctctgcccagaagacactgggcgccgccatccaggagcgctacgcgtgcaaggcgttcctgccggatgctgtgccggacaagacgctgcaggagatcctcaagctcacgctggtgcggcgcctcttacatcttgctacaatatagtagtacagtgacatagcggatctaatgacattgcattgttcttgtgtatgcagagagcgccgacgggcttcaacacgcagccgtacgcctgcgtgctggtgcgcgagcagaaggaccgcgagaagctggccgaggccatgatggacagcaacgcccgcaaggtcaaggaggcccccgtggtggcggtctttgcagccgactgcggtgcgtttggtgacaatgaagtggggggcactttggagaccagagtgttgattgacgtgttgctgtggttgtgcattgtggactttagagccgagcaagcgcgtcccgcgtctgcagaagctggcgcacgacaacggcgcccctgtggacttcgtgagcaatatgccgcacgtcgttcgcctcttctcgggtgagggcgtcgttgcaagcggcctgcgtgctgccattgccactgcagtgtcgccgctgcagccggcgccctcgaacgtgtcgacggaggcgtgggcctacaagcagacgacgttcgcggctgccaccttcttgtatgccgcacaggtgcatggcctcgcgacgtgtccgatggaaggctttgaccagatccgcgtgaggaacgcgctcgatattccggaccgctacggcgtgccggtggtgatcgctctgggccacccgaacccggctgctaggccggagaagccgtcagcgaggctggaccccaccgaggtgttctttgacggcaaatttggagactcgagcgagaagattttctcggataagtaaggaggaggatgggaaaggttggatggcgacaatttccatcagcctcgatttaaaagttacattgacacgaagctgaggtccaccttttagatgtactcgcttgaattttcgtggtttcattattcaactcgtcgttgcactggtggtatggttcttgccactcacttagctttcctcggtgagatacccttagacaatggctaagtgatcgactgcgatgcgtgcagtgagcgcgatgcttttagaatattgttgcggtgaaacgtgaaatctacgtgcacgtcaagtagtagagagtgagttccacacatcaactacttcgaagtatattttgtacgttacaatgagcatgccaaccgggtattagctgcaataggacacagccgatcgagcaggatgtgatggtgccagctcttttaccacactttttccgcttagtccagcttaccaacaccgaagtagctggtcgtctcggcccacacactctccacctcgctggcttggatcgacgtctgacccgcctggaccgacgacggcttcaccgtgccagcagtggactgctccacttgctcctgctgctgctgctgctgctgttgctgctgctggtccaatccgctggtctgggccgtctgctgctcagggccagcagcctcagcggagtccgaagcgaacttggcaaacgtagggaccgacttgatggtctccagagcggtttcgccgttgcgcgacgggaagatgccgctgttcaccaggacgttggccttgcacgcgcggcccaggaacttgctgcactcgtccgcgctgcccgcggcgtacagcgcgccgtcgttcgtcttgttgaagaggggcatccgcgtgttgctgaagtagttgtcctccgcgagcacccaggcgttggcaccgatctcgaacgagtggcccgagttgttgccccagaagttgttggcgacgtgcgcgacgacacgaatgtcaggctcgccgccgatcttaggcgagcggcccgaggtgccgtgcacgtagttgttgagcatgctgaactgcgtcgtgccgtagaagatgaaggaccagtagtggtgtccgtcgcacgacgccgagtagtcggtgttgccgtcgaagtccgagttactgatggtcagggagtcggtgctcgccatgttggtcgtgaggaactgtcggccgacgtgcgagaccttgatgtggtcgagccaaatgttcttcatggcggttttgccgtggtccagaccctggaggtagatggcgtcgccaccccagacgaggtgtcggttgagctccgtgatgtggatgttctgcacgatgatgttgtcgccggctagcgtgaggcccttgccgatgatcactccgctcttgccgataccgcggatggtcttgttgcccttgacgttcatgcgcttgagcggtgcgttgtcgtacgtcaccgtgacgctggtaccgccggtgcagccgcccgtgttgttcatgcctccctgctggaggatcacatcctggctcttgaagccgttgttcttggccatgcatgcccgagtgtagtctggacggcagccaggctcggtggtggtgccctccgtgccacggaagtcgaaggtcttgttcagcacgaccacgagcggctccgacgagttcaagtacgagatcaactcggttgtcgtggtcgggtacaccgtcttgccggccgctccgccagtagcaccagcagccagaccgggagccgtgccaatggtgaaggcgttggcgctcttggcgacgagggccaatgcggcggcgatagcgagttggaggcggcccatgctgacgaagcgaaggtgtcttgagcttggttcggcgggtggagggagggaaggtattgcgtgaggctcggcaaattggagaatgaccgttggctaacggacttgagcggggcggccttgacgtcaacgactgtagtgcccctccctacgagtcgttgatgaacaggtaaagcggccacgactgcttgtaaacagcgagtatctttctgggtcgctgtcccggcagtctcacgatagaatttgtggcgtggggagctgcgcgtcgtcagtctcaccgtgcatcgttatggaaatgcagccgcattgagcgagcaggacacaatacatgtagtgcagtaaatgcacttctcctgcaagtccacgatatcgtatgctgcaccagaaccacagaggcaatcgggagctgcacttcgttgactgcacgagttggtgactccccgtctcaatgcacaatctttgaattaaagatcgatgccctgaatcagtcaggcatgtccgcaggggggcattttgcaaatcatgccccttttgctactacggggtacacctgggacttttcaaaggggtagcgcccgatcagtattgtatgtctgtgtattgaaaactagaaaggggcactacgaatatgtaaaagaatgtataagtaatgaactagagtgctcggcttggagggcaacgagcactagacagctacctgcctggacagctcgtctgtcaaacgcatgggttcaacgtattgtcgagattgctatttaccttccatcgcgtagttgccaagtctaccacgatgtgggcccgtcgtacgctgaggtcactctccactgtgtgagtccctgacatcagtatcgaaatcttcaacgtggacacgaacgacaccggcatccacggcgtcatgcagatcggctgctagcgctagggctactcgaacggctacaggtccacctgccgcaacgtaggccgcggccaccagtactgctgctgcggcgacaacgttatgatcgaccagcgtatgagcaagttgaacgcgtggggcgctgacgcgcgcaccaagatcgcgcagcagtccaagcagtccacggctacgtggaagatcatcaactcgcactacagcacgtaccaccactacgccaagtgcaaaatgaagaagtagttcgatctgctgcgcggctcagtcatgcacatgtggctcaacggtcacgcacggcgagaagtacgaatactcgctatcgctaggcatccacctcctcgagcacggcgctggtggcgatatccagaaggattcggccagcggcagcccgtcgtacgcggcatgcgtgcacaacctccataattgattttggaacgtgctctagatttccgtacacccaacgcaatgacttcagtaacctacgccaaccgatactgacattctccaggagacagcaaggctatcatcctcacgtcactgataaagggaaagatgtctgttattcaccgtcaaaagttagtcgactggaaggtaagcggtaagaacgtgctaagcatatcttacggcaacggtcctgtgtggtggtctcatttctctgctctccgacgtccatgcttttaaatagcactaacgaattgtgcgcactacttaaggtggttggccgttttgatcgtgttcacattcatagagccgtcttccgtgttcctctcgtgtttagactgcatcgttcgcacaaactcatccagagcgggtattgtgcttgcgaaccttgcttcgcactgtgagcgttgattcaagtagctgaaggaaaacaactaatatagtaggaaggtttgtatggctggtcgatcatttcagagactaatctgaagtagatcaatgttatgagcaaggtaatgacaccgtgccagttctggtgacttatttgctactacaggcatgtcctgtagtcctaacacacggtaccaggtcgaaaatgtgacataaagtacagcatattcccttcatcaccaggatttccttagttaagagggggcactcttggcaactttaaaggggtatttcgtttttttctgtccacactaccccctccggacatgcctgtgaatcagagtcgatacgaagccgatcttttgaaagcattataagcatttgtgaattgtttctactgtagatggcgtacggaaagatggtctatcattttaattgccggcggttgcaacgcatatgtagataacacacgtcaatggcactggtacagtacattgtattgccgttgggacggacgaccccacgaacttcgctccgtctcgaagccgagcagcgaaaacgaattatacgaaaatgatacggatctcttatattttatatccaatatgagagaatttatggacgtcgtctcgaaatttgttgaagcaaagtcgcaagatacggctggttacagatcgaatgatacgtacgaagttgtctgcacttacgataccgacgccacgacagcgagtaggtcctggttgttcgcccgccgtggccaattgcactatgagagtccgatacagtcctagcatccgaactacagtacgcaacttagatagtttcaattggcactgcagcacactgtacaatattcgttacaatcaataccgtctgactcacaggcaccgtgtctctgctcacattttaattggacacgtcaatcgatgttttacgcgggcccccatcatgcgtagagttcgtcacaggccgcctgccaaggtgctaaagggatacaccatcgatctcgtaatttgattctcgatcggggtactatatgtgccattttcctttagctaggggtttcttcggccacatcgactaacgcccatgatgcgtttggtacgtttcgatcgcctcgacaaaccgacatcgatacggacgcaatccaccagccgcaaacttcgctcatgttttcaagcgacctcgcactatccacggtaaagcaagattgtgataaaaaggttgttgaactcattgagacggggagtcaccaactcgtgcagtcaacgaagtgcagctcccgattgcctctgtggttctggtgcagcatacgatatcgtggacttgcaggagaagtgcatttactgcactacatgtattgtgtcctgctcgctcaatgcggctgcatttccataacgatgcacggtgagactgacgacgcgcagctccccacgccacaaattctatcgtgagactgccgggacagcgacccagaaagatactcgctgtttacaagcagtcgtggccgctttacctgttcatcaacgactcgtagggaggggcactacagtcgttgacgtcaaggccgccccgctcaagtccgttagccaacggtcattctccaatttgccgagcctcacgcaataccttccctccctccacccgccgaaccaagctcaagacaccttcgcttcgtcagcatgggccgcctccaactcgctatcgccgccgcattggccctcgtcgccaagagcgccaacgccttcaccattggcacggctcccggtctggctgctggtgctactggcggagcggccggcaagacggtgtacccgaccacgacaaccgagttgatctcgtacttgaactcgtcggagccgctcgtggtcgtgctgaacaagaccttcgacttccgtggcacggagggcaccaccaccgagcctggctgccgtccagactacactcgggcatgcatggccaagaacaacggcttcaagagccaggatgtgatcctccagcagggaggcatgaacaacacgggcggctgcaccggcggtaccagcgtcacggtgacgtacgacaacgcaccgctcaagcgcatgaacgtcaagggcaacaagaccatccgcggtatcggcaagagcggagtgatcatcggcaagggcctcacgctagccggcgacaacatcatcgtgcagaacatccacatcacggagctcaaccgacacctcgtctggggtggcgacgccatctacctccagggtctggaccacggcaaaaccgccatgaagaacatttggctcgaccacatcaaggtctcgcacgtcggccgacagttcctcacgaccaacatggcgagcaccgactccctgaccatcagtaactcggacttcgacggcaacaccgactactcggcgtcgtgcgacggacaccactactggtccttcatcttctacggcacgacgcagttcagcatgctcaacaactacgtgcacggcacctcgggccgctcgcctaagatcggcggcgagcctgacattcgtgtcgtcgcgcacgtcgccaacaacttctggggcaacaactcgggccactcgttcgagatcggtgccaacgcctgggtgctcgcggaggacaactacttcagcaacacgcggatgcccctcttcaacaagacgaacgacggcgcgctgtacgccgcgggcagcgcggacgagtgcagcaagttcctgggccgcgcgtgcaaggccaacgtcctggtgaacagcggcatcttcccgtcgcgcaacggcgaaaccgctctggagaccatcaagtcggtccctacgtttgccaagttcgcttcggactccgctgaggctgctggccctgagcagcagacggcccagaccagcggattggaccagcagcagcaacagcagcagcagcagcagcaggagcaagtggagcagtccactgctggcacggtgaagccgtcgtcggtccaggcgggtcagacgtcgatccaagccagcgaggtggagagtgtgtgggccgagacgaccagcaacttcggtgttggcaagctcgactaagtgggagttgtgtggtaaaagtgctagaggcaccggcatccatttgattcacaatgaccccaagtaggatgtactggtatcacaagttgtagttaccgatcgtatgcattctaacgtacaaaatatagttgtttgatactttgtcgaaaaaggtcgtatgcattctaacgtacaaaatatagttgtttgatactttgtcgggaaggtttaaccaatgaagtcaaagtttgcaggaggagtgtgtcgctttgactcggcgcgtggatccccgacggatcgtcctatgaagcgccgcacaacttgtacgcggccgcttgaaaacaccaccggtcttcgggacaggagagtttggcggctggtggattacagtccgtatccacgtcatttcgcacgaacgtgctgtgcatgtatgtacagtaccagcattggatgcatgttggcagggaacaccgtatctagtcgagggaaactcaatttgtcgttgtagtcgaccgagcttcgccattttcgctttctatcggaccatgatgctataatactacaaggtttggctctcacaatgcacctctcctccttccctacagctcccaggcaagcaagctatctatctagatacctgtgacgaacttcaggctggaggggtctgagagtgcttacgtacacagtctttttttgatgggggtggtgaatgtgatatagaagaggaccaatggaggctcgcggttgcgaggagcgtagccgcagcaaacccgcgcgaggtgcccgcgtagcagggccgcgcggtatttgcggaggcgggcccagcgacgagcattccagcgagccgagcactgttctcgccaggtgagagaatctttttatcgcaggagcgcagcgactgcctttgcggagcgcagcggagcaaagccatttcccgcggatgacatccgtcctgcgggaaggtcgtcacattgtggggtgatgggctgcctatacaaactccaagatatcaccgaaaatagactgtgtacgtaagtcctgccggaggggtctagtttctcttctcggacggtcgaacagaaggtatcgactgagacaaggtgtctcttgtgagtcagacggaaaccgaggagagatcagctatccacaaccacaagcgagcgctggctgtaccgagcgggcgggcgcctcgagctcgcagattctgacgctgtcgatagcaggctctcgtgctgcagtacagcaaccttttacagcacggcgatcaaccaaaacaaacaaacaactataacatgcatatcgtgctgtacagtagctgtatttgtgagtgcactgcctcacgcaaatcgtatccttcgatctgcgccagccgtattttgcgacttggcctcaacaactttcgcgacgacagggtcgatactttcatatttggtacgaaatatcatatttcatatttcaaatatgacaagcggtagggattttcccaaactaagacgggtccgcagtgcggactccgcaacaaggataaccttgccgtttcaagcgcgcacaacctgctaaaacaaggtgaagtggctcctgtgaactgtgaacatcaatgatttatttttcatctcctactaccacactatatgcaaacatctatcaactctatgacacgatagttgccgtacttggcagtagtgggtcgcggcacattacgccggcagttttttattttcataatttcttaccgtaatttacctccgagaacggtgctagaacgatctttgtggatagtcgtccgttttacctacacgacctctcaaccacctcagagctcgaggaggcgtccgttagccagcgaccagacgcgcgaccctgtagtcgtgcaggatcgcacatgcgagggtaagatgaaactcccaataattactggcacattacgacgtcattttcagaattaaaattttttcaaaaaaattaagaggctatgtatatagatatccacacattgaacatgacgatcgaactatctttcggaaaatacaaaggtcaatccattgaggatgtattcaagaatgatcctggatactgtcgttggattcacaaccaacccagtctcaacattagcgaggaaatgaaaatctttcttcactcaagattcctaaataacgataactcctatatgatgacgtggggtaagtgtcgaggcaaatctttacagcagatcagtaaattggatccagactatctcgattggctaagaaaaagtcaattcgtgattgacaagtgtccaaagctactcaaggaactgaactaaaaaatatctctttttttacttacgctgtagtgaagtctagaacctctccggttagtctatcgaacgttagtacctgttcgctaattacgaggatcagcatattcacaccttggcatccggcgttcgtaccttggatctgaatagcctgaggtacatcgcgctcagtcaggcgactgacatcggcaataagcatgcggtttgtgagcgaccacgtctgatagtcaagtagaccatttacgagctcaggggttagatctccgttaatcgctgaaattttagcaattgcgttggtaaagtggtggaaatcatagtcatgactgatatcgaacacctgagtcgagccaatacgaacgttaaagttgcgaatcgacgacccggactgaagcgtgtatggagagctatcgaagggactctagaactgctgaacagtagcagaagcaaagttgtttgtctgttccgcgaatggtaaaagcacaacatatttcgcgtttttaacacttgccgatagctgtaaatcgaaagaagcatttagttgagtcgaggacttattaataccagcacgctggtaaaaccactgtgcgtagcaatcattgtagcgaaccttcttaaccggcttagagataatagcttgagggttctcaagatgaacgaaaggggcataaaaacgagcagtagtaaaaggcatgtatgtaccatcgatggtaggttcaagagcatttacaaccgctccccaagcaacactaaagccagcagatgcggcaagcacaccattcatcggattaccggtagcagaagcggcaatcatgaccggacaactattaccagacgatagagtagtagaggttagcgacataccctttgaagcatctaccgcgactacagacgttccctgattcacacggaaacgcaggcgaatttgagggttagccatcaagtcaagctcacggaagatagcatgcagatcggtgagcttaatcttaagcatgtagttccacgttcccatgattgcgttagcagcagtaccgccagctacgaaagctccacgcgaggtctggttagaaatggtagtcgatgcagcagcaccacctaccgacggccacgagctggagaagtcagcgccagccgtaggaggattcgatagaaggcgcttaacgaaaccatcattaggaatagttgcaccaccagaaggagccgagacagcaaaggaagacgagaatgccatggtgtttgaatatccatcaccactggtagatgcggatccagaactgtatgataccgactgagcagcgtcagggtacaagaacgattcagctccgtgcttttcaacgtactgagggctgtagacagtctgagcacgaacgttgttccaaaagagcttgtagtcagccatagagacgatagtctttccgttgagttccagactcagactatcaataacgttccaatttccgcattttagagtagcacatagacgattggcagcggcagtttgagcagtgccaccattcttcattgagaccttgtagggaagcataatgtaggcatcacgaaggcttgcgaagccctcggaacagttaagctgagccgtagcatcgatagtgatgacaccattctggtacgaaccctgatttaggtcaataacgtgcggtacacgcttgctcgaagataccttgatctccgggtcgctcttaagcgagctctggtacaagtactgatcggatagttgagtttcgctcatcgttgaatctatatggatcctaatatagtttgataaaattaaatattatgtcgcacctcatcaagccaatcacctcagatcatgatctcatcgaactcgctgagaaaatgaacgttcaactcgataatatattcgaatcaaataagataaagtcccatctccccaagaaagggtcctttctgattctacttcgccctcctaatcttgaggtaggacactggacggcggttcataatggtgaattcttcgatagtatgggggaaggaccaccaaagaagtatggtatcgatcgatacaacaccaagcaataccaaggaacctatggagactactgtggaccattatgtgtcctatggctatattcgaagcaataccgtaagccagatgtattcaaaacaatgaaagatctaaatatgacaattctggaataaatttaattcaacgtatatagtaatcatgtatcgcgaattaacaatctccagtgatattcctgcgcggaagcttaccaaagctgtcaagactggtaagctcagcctcacctcaagcgaactaaagggtagtggttcagtcatccatctccaccctgcttcgtttgaaatggcgctcaaggctcgtaaagctggacgcggtgtcagactcgacattaccaagcacgaagtgaagaagggctacaaaaaggctcaaggaggctctatctggtccaaagtatggggagggatcaactctgcatagaaatttgctaaggattcaggtctactaccagagccgttgatgcggcggttcctgctttagctacttatgctggtcagccgacggctgctgttccagccagagctgcaatcaagtccctaaccggcattggtatttatgattccgatagcgacaaggaaggaggtcgcgtatcaatggctgacgtaaagaaggctgcaaagaatgctcttgcatacacgaagcgcaagggggtcatcaccgacgcggtcgatgctggaaagaagttcctactatcaaaagctaccaagccggaacatgaggatctaatcagatctgtgcgaaaggaggttcgtcgccgctatggtgtaggcgtagcaaagaaacgtccagcgaagggttcgccagagatgaaggctaagatggctgcgctcagggcacgtcgtaagactggtggttcgtttacgttgtagccgccctaaaaaaatactctggatgtcttatttttttggacgaatcagaggatgatggataccgacgtatctctgaaattcacttttttatcattttggttatagatactgagtgtaatactagctcgagcgccattatgacagttcatccacgcatactggctcggtttgtatgagatgacctttccaatagcggtatcacctctatcaaaagcactgacaatatcaccagaagccacgtattcgtttttgatcagatcgcaacgaacgatgtaggaactggtcgggtgaatctgaggaatgatgttcgatagctgagcacttgcaacagtagctgatgtggaggggtatgtacccactgtgagaccaactactttaccgaattcagcattatcgatgatcagtcgaggaacgcgagtagtagtcggcaatccagtaccaccagaggagtataaaccggaggtaggtctggtccatgttccaccggtagttggtagagttgtaggcgtaggagagaaatcaagctgacaagcgtaatagacactgttagcactcattttgatatagaatacgttattccctgacggatcgattagatacgcaccagcattgacaagagcagtctgaatgcttcggttgatatcctcatacgaataaataccatcagggagggatacactgattgtggatgtagttgcagcggtaggtacttcgattttgaacgttgtgttctgaaattgcattgaatcaatgttatactcgctgatatacatcgaaatcgattgaatggcacatactacatcgcggaagtcagccgccgatccgggaaaggagtatttccaggttgaattggttccatcttgtaccagattggtgctgtcgagtttgataaagctggacatattgattatatgtttgtaggcatatttttgtttgataaattggaattagtcctcgatacgaatcggtctatcgaagttatacctgatctgacccttgaccgaatcaatgaagagcatttggccctttcgctccgtggctttgttgtaataatagacgattgaacgctcatctactccctagatattaaaatctttcnnnnnnnnnnnnnnnnnnnnnnnnnnnnnnnnnnnnnnnnnnnnnnnnnnnnnnnnnnnnnnnnnnnnnnnnnnnnnnnnnnnnnnnnnnnnnnnnnnnngtatgataccgactgagcagcgtcagggtacaagaacgatccagctccgtgcttttcacgtactgagggctgtagacagtctgagcacgaacgttgttccaaaagagcttgtagtcagccatagagacgatagtctttccgttgagttccagactcagactatcaataacgttccaatttccgcattttagagtagcacatagacgattggcagcggcagtttgagcagtgccaccattcttcattgagaccttgtagggaagcataatgtaggcatcacgaaggcttgcgaagccctcggaacagttaagctgagccgtagcatcgatagtgatgacaccattctggtacgaaccctgatttaggtcaataacgtgcggtacacgcttgctcgaagataccttgatctccgggtcgctcttaagcgagctctggtacaagtactgatcggatagttgagtttcgctcatcgttgaatctatatggatcctaatatagtttgataaaattaaatattatgtcgcacctcatcaagccaatcacctcagatcatgatctcatcgaactcgctgagaaaatgaacgttcaactcgataatatattcgaatcaaataagataaagtcccatctccccaagaaagggtcctttctgattctacttcgccctcctaatcttgaggtaggacactggacggcggttcataatggtgaattcttcgatagtatgggggaaggaccaccaaagaagtatggtatcgatcgatacaacaccaagcaataccaaggaacctatggagactactgtggaccattatgtgtcctatggctatattcgaagcaataccgtaagccagatgtattcaaaacaatgaaagatctaaatatgacaattctggaataaatttaattcaacgtatatagtaatcatgtatcgcgaattaacaatctccagtgatattcctgcgcggaagcttaccaaagctgtcaagactggtaagctcagcctcacctcaagcgaactaaagggtagtggttcagtcatccatctccaccctgcttcgtttgaaatggcgctcaaggctcgtaaagctggacgcggtgtcagactcgacattaccaagcacgaagtgaagaagggctacaaaaaggctcaaggaggctctatctggtccaaagtatggggagggatcaactctgcatagaaatttgctaaggattcaggtctactaccagagccgttgatgcggcggttcctgctttagctacttatgctggtcagccgacggctgctgttccagccagagctgcaatcaagtccctaaccggcattggtatttatgattccgatagcgacaaggaaggaggtcgcgtatcaatggctgacgtaaagaaggctgcaaagaatgctcttgcatacacgaagcgcaagggggtcatcaccgacgcggtcgatgctggaaagaagttcctactatcaaaagctaccaagccggaacatgaggatctaatcagatctgtgcgaaaggaggttcgtcgccgctatggtgtaggcgtagcaaagaaacgtccagcgaagggttcgccagagatgaaggctaagatggctgcgctcagggcacgtcgtaagactggtggttcgtttacgttgtagccgccctaaaaaaatactctggatgtcttatttttttggacgaatcagaggatgatggataccgacgtatctctgaaattcacttttttatcattttggttatagatactgagtgtaatactagctcgagcgccattatgacagttcatccacgcatactggctcggtttgtatgagatgacctttccaatagcggtatcacctctatcaaaagcactgacaatatcaccagaagccacgtattcgtttttgatcagatcgcaacgaacgatgtaggaactggtcgggtgaatctgaggaatgatgttcgatagctgagcacttgcaacagtagctgatgtggaggggtatgtacccactgtgagaccaactactttaccgaattcagcattatcgatgatcagtcgaggaacgcgagtagtagtcggcaatccagtaccaccagaggagtataaaccggaggtaggtctggtccatgttccaccggtagttggtagagttgtaggcgtaggagagaaatcaagctgacaagcgtaatagacactgttagcactcattttgatatagaatacgttattccctgacggatcgattagatacgcaccagcattgacaagagcagtctgaatgcttcggttgatatcctcatacgaataaataccatcagggagggatacactgattgtggatgtagttgcagcggtaggtacttcgattttgaacgttgtgttctgaaattgcattgaatcaatgttatactcgctgatatacatcgaaatcgattgaatggcacatactacatcgcggaagtcagccgccgatccgggaaaggagtatttccaggttgaattggttccatcttgtaccagattggtgctgtcgagtttgataaagctggacatattgattatatgtttgtaggcatatttttgtttgataaattggaattagtcctcgatacgaatcggtctatcgaagttatacctgatctgacccttgaccgaatcaatgaagagcatttggccctttcgctccgtggctttgttgtaataatagacgattgaacgctcatctactccctagatattaaaatctttcacaaccatctggaggtctcgcttagaattagctttcaggatcgctacgtaatctgagttcaatctgatcatcttgtccgttgcgaagtagctgtggctcaagaagatggttgatagcttgaagtggcgccctctagtgaagtaatgtgagaacaaattcttctgaagaagcttatcgttgctgtagtcatcgatgatgacgagctcaggcttattggaattaattggtgtatgacgtacccgttcaacactcggaggcgagtcagggtcggtgaatgtgataaagccatcaagcttatcacgaagatactcatataactcctggtgaggattacgagcaatgatcgttagatgagcaaatacgtgaggagaatgcttgaggatgaacatacataagttgttctaccctgagaacgatgaccccagaaccaccattctaaacagcgctttgatgtcaagtgctggaatatcacccatagaggcgctttgaattttttagggattgaagctccgaaatctggaataccgctcatgattatcgtctaaactatatagaatcaaacaaagatgagttcaggtttttcttatcctagcccgatattcacatcgccgatttataatccggcattctttctccaattggatgccagcgggtttctaacgtatgactatgctcagactctttatctgaacaagtatgactatcgcttgacgtacattaccggtgtctctcaaggcgtagcatcacctggtgtagcgcttgtccctggaagtggtgggaacatcagcggacttggagcactaagctgtagtagcctaactgttaatggtgcttccgtttcaggcgtaccaacgtatgtagctgatactactccaggtactgccgctatcaacaaagctctggtgcttggtgcatcaggtgaaattgctactattagcagtttgacggcaacgtcgactactggcacgctgcagacagcggctcagcctaatattactagcttaggcacgctatcgtccctcaccgtgagtggaaagatatctggtacattggcaactgctgctcagaccaacgtaactagtgtagggacactctcgtcgctcaccgtgagtggaaacatcaatggaacgctagcgacggctgctcaaccaaatatcaccagcttaggtacgcttactggattgactatcggagacagtttaacctttactggtgcaagtcgatccattacaggtcttagctcgctaactgcaactaacattactggtacgctacagactgctgctcagcctaatataacatcgttaggtactctaaccgctgtaaattgctcgggtaatgtatcgggtacgctaacaacagctgctcagcccaacattaccagcctaggaaccctgagctcgctcacagcgacgtcgataacaggaacgctacaaaccgctgctcagcctaatattactagtctaggtacgcttagcaatctaacccttagcgctggtggaaccggtttattcatttcgaatctgaaattttgggatggagtcagttcttggataaatttcaatcatgcttactttgtcaatgttatcgaagggggcgcttcagccagtagcgttgtggttctcaatagtacgaaagattactcaggcattcgcgatctaaccatatcacgaaactttatagcttcgacttcaatatcatcgcctacgatcacatgtgatacgattagtaagtcaggtactcaaactatgaatgcaacgaccttgaatatcaatcctactacgcttcaactcaggggagatactctcaatactacaggtgcggagctgaacaagcttgctggatgcacagcatctaccgttgagctgaactatatagatcttaccaccggagcaggaactgcagaagcctcaaaggctcttgtactagactctaatagtagcatctcatcaggtatctcatctctaacgtcaaccaatctgatatccactacttctacccaatgtcagattgcggccgggacatcatttacatcaacaacgcgtgcctctgattttaatctcatgattcgtaatcaaagcaatacggttggcgctcaggccggattatcgttcacgattgaaggtactagtgatatgacaacgtacacccctagcgttaatctatattgtactagaaccgctacgagtcttcaatattcaatggctgattttgcaatcagtagctaatgcattatcaccaatgactgaacgtatgggaatcactcaagcaggatacattcgctttggatcagctaccagtactgcaagaatagatatagtttcgagcgcgaatttactaagcgggtcttggcaacgcgcaatgcgtatagccaacgatgctactactccaatcgaatttgaaattcaggtatacaatgatgtcgcgggaggaagtagtggtgtagctctaggcaccactaccagcgacccgctaaggttcatggttggaaacacaactcaagcttatctaaacagctcaggaagactgggagttggtatgagtacgtggtcgccagaagcaaccattcactcaggcggagaggtatgggcgaataatttcatgcacgtaaagggaggcggcgatggatttgctaggtatcgattcaattggtctcagactgactatccagcgattggtactgattcaaccgtaggagctatcaggttgggaaaatgcgatgcaaattacgcgtggacagcctatgtcccggtgcgtggaggaagctacaccaatgcaagcgatgagaggttgaaggcggacattgtagactgtccctatggtttggcaagccttatgagaatgagacctagaaaattcaggatggttcaagagcagactgtccatgttggctatatcgcgcaggagctgtataaggtcataccagaagcagtagatatcggagcaaacgatgaacttaatccggatgggtttccagtgaatccatggggaatcgatctcgccagtttaacctcggtactgtgtaaatctatccaagaacagcaaggccaaatcaataatctcaaagctgaactcaatgagttgagagcgattatgtctgagtaaatatagaatggtatctgtcaaacccagttcgtggcgaagaccgcttgccgtcagactactaacgctaatgtcgttgatactgatcaactacaatgtgatcgaattgtcgaattccacgagagggttatatatggtattggctcagggataattttgcaccgataaatatagagcagatcttgagtacttcgttgtaatagagtatcatgggctgtggaccaagtaaaacgatcaaaaagaacctgactaaccctgaaactggccaagtcatcggttcaataacgatgcacgctggagtggtttcgatagggaattatgcttatatcccaatgtacaacgtacatagtggcaagaatgctgtcatggctatcgatatcggagataaaaaaatccgactctatcgagagaagaaaacagacgtagacatctaagtatatccgctctgctctatagagcaaatgtcttcacagactttgactttttttttggctggtaagcccagactcggccgccttccgtttaggtagatggctccaccttcttggtcgacttgtcgaggtcagtagcccccacagcggcttgggtcttctggggacgatcatgaatgatgaggttcttcatgatagctttcaactcagcgacgttgaggtcgctattgtcaccatagctgcctccggaactggatataatgcgcgagttgaagaagaacatggttttataataaacgggtgataatatctttgcactctttatcatcaatcagtcgattgctgtacatatccaccgtgagagacttgagctgcttgataatactggggttgtcatttccgagttgtagctctccttttagcttatcgtattcagccctaagcgtatctagaggatcctctaacttatcgtggaagctgtattggagatgagtaatcaatagaacctccttgaacagtttcttatcttcaacgctgagcttatcgtaagcggattgatcgatacggttcttatagacaagtgccttgatcatggcttggaggctatcactgatttcccacttaggaccacatttacgccgattcggctgaacgatcacgagctttttagcatcaaggtcggggatacgaatatacttgcttccgatctgcttgtatgtgtaggctgacggcgttgctaatccttggatctcattgagattgtaggtacggcctcggcgaactacaccttccagcggggcaacacctgcaccgcgcaatcctggaccttgaagatttcgtttaacgccactgccggatacctcgcttgcctcggcgtatcgcttagccttcgtttgatatatcgattttgtcgccttcatagctgatgtagctgccttcaacacctatctcgctgcttttgagttattccctctaacagcctcttttgcttcttcatagcgtttctgagcctcaccgtatgtctgaaaagctgcttctgactcatcatgaagcttttgcaagctgccatcgtattcatactcttcaatgctttgctgtctaatatcgtgtacagactttagaatagcctcattcaatatttcaagaatatcatccaggtttttacgtcttttcttatcaagctccttttcttcaagtatctagctgcttcttcatcgctcgatgggaaggggtattcaacctcattaaggtccaaatcctcaaccccgttgagtagggacgaaaaggtatccatccacatgatattcttcattagccccttccaagctacaccactcacctgcttgtgtgctttgttttcacgatttaaaatattcaggggtctagaccccgatggctgcccaaagtagtatgatggatgggacttaacaacaccgttgattttcacgattggttgtagccgaaatggaatatcaatactattagcgtgcaactggctgtagtaatcagttaagatattcttggcgtcgttatcagcgtttgataggcttgggtccatgtcttcatcaataccactcattaacccatgctgagcttcaccattagctggggtaaaatcatttatgtgtttggtttcattgctaccaactagttctaactcgaggcccctggctttagtcatattaatgaaagattggaatgtcattatccagttcactttctgagcgattgcttgcttcacacgatcgctatctttcccgtaaacgctaatgctattgcattgatccaaacatagccatctttgtcaataggagaagattttgcggaaccattaagaattggtacaatcttctttatcaatccgttagattcaaggacttccctatttttgctaattgtccaaaataatttgagcttgctgtccatttgatcggatcttgtggatgttccagtatcgaacacaaaactgtcgtcaagtctctgctcagagcggtttgaataatctccttctgaggcattgattctttttctttttgagccaatattttgccaaacctggtatgggctatttttgtcctctttacccatctcattacgtcactccttctaattgacgtatgcgaggaatctgacatcattaattaatacctcaccaatatggtcatacgtctcagaccaatccatgctcggaactagtacatattttctcagtttaatactgtacaccttagcatccatcccaatataatacttagtaagctgccggccgttggaagcaatagggtgaatatttagttctgcaaggatggggtaaacctcgaagattttagcgaccgcttcctttgactttgtttgatttttcatctcagcattgccttcgtcgaacaaatcttcttcgacgggcttttgtggcagtggactatcagggccaacaccagcatctgtcattcttgcactattatcaactccaacatcagtcatatcggggctcacgtggacccaaccatcactggttttggtcttagcagtactggaagcatcaacggactgaggctttgcagtagtcgatgcatcgttcatttcaggtgttgcattaacttcagcatctaccattgttgaggactcaggttttttttgggagttttcaatattcagacttttttttttttaactcttccggcgtagcctcgtcagggccaaccgaaatatcagactgagcggattgtgttgatttctttggaacagtagtgataccattcgcgataccgctagctcatgatgcaccttcgtacataaggcgcttagacgtggcttgacgaactcggcgctcagctcgttcgagtagctcctgccgattttgctctcgttgagcgagggatgtaaagttgggaaacatcgtctaactatatcatggcagtcataaaaaaatattagcatcgattaaatacatactcaccaatagcttggcataacggagtcatgcctaaatggttgatacgaatgacagatacggtttcgctcattgaggagattgatgtatcgatccttgatgcaatgaaacggcacaccaaatatcgtttctaactggtcgcggtactgtagattgtacacggttttccggaaattggctactgggtctaaatctctgagttcatttttgattcgactaacctcttgaattatccacagctttcttcggagctgtacaagctcacgttgattatctacgcagttgcaacacattctatatatgaagtcatatatttttaagcattatttttggaaaatcgattgatagatatagatgagtcaacgcttacagaggattgctctattaaacttatttcgaagctagttcgactcattttttatcgacttccagtactcattctctaagattgatttcttgttcttattgactaatctaagattatcttgtggctcccaggagtccagttcattaccgacccactgaacgagatacttgtacttgccggatcgcatctttttgtggtctaagatcttctccacctctaaaatatcacctctgttgatagtagcttcagatgtttctgctttaacaatttttagatcgtttggccccttgtaaagagtgtgtccgtttttcgacttgatttggatgcggtagccatcaatacctaccaccgaatacacagccttagaccatcttgctgcttctttatcaaatgttttcttttttagtcgatacaaaatcttttcaccgacctcgcactcgttttcaatcctctcggcttcagcctggtcgtggactagttcagattcagttaccttacctttagcttcgttgggggtcataccaatcgtccgatgggtcgtgctattgtagttctcaataacagcagctatgagcttctgggttagtcgctttggttcgattttgacaaggcgctgcttcagagttctattgaagcgttcaattttacccattttggcgtgatctccaggctcgttgttgaaatggtcaattttcttagttttgaataatttctgagcctgttggttcatgaattctgaaccattatcggttgtgagaatgtcaaccttatggaggaggacaaaaaccctaattgctgctggtagttttgttggttagtagttttgcgtagcctaggctagagttgatgttgatcgcagtcaagattggtcttttctcccaaaacgccaagtccatctgccacgaattggggttagtcgatgcgattttgaacccatcgtatcgcttcttctgctcctgaaatcgctgaatatcgctctggtttgagtaccattccttgacgattttcatcgtaatcttcggctccagttctttagccttctggtataaggcttgggcacccacatagcccgttttggggtcatagtataatttgaacaacagctgatccatcgctctatatggttataaaacaaaaaaatcccctgccaggtacttgcttatatgtcgagcggttcggtggtgataccatccgcaagtacacgacgcttgtcataatagtagtttagagctgttttagtctgggtgtacgtaatgattgacttactctccttactgagtctaaaccccttgttggtgccctgtagcgtgatgcgatcgcgaacaaccgattcaaagccatctgggttgaggacgtcgccattgcggccaccactctgctggaatcccttcgctgaaaccttgaccttgtaagattcgtctggtaggtagcgaatgtagttcttagaggacaatgataccatagcatcaccagaccactcatccttgaacaaacctggcgttcggcgatcaaactgagccatctcttcgctataatcacgtgggaaccactcgtacttatgctgctgaaaatgctcacgaagctcgggcttgatacactcaacgaatggcttctcacagctggacgcaatataagccgagtctgtgtccatttcttggtactggaattccgaacggtcgaagtagaagtcaatgcaatcatagtagaattgcaacatacggagcttagcgagctgatagattgcaatcgatagatgaattgggttcttattgttgagctttcgcttcttcatagtgaattcacatgaataattcagctcttccattccgtggaaggtgaagtgctcaatcttggccttgattgccttatcgtccgactcatacctgacctccttgtgcttgctcatgtccatgccagatcgaccaaacgcactattaccaaccagtttcatcatctcagcaatcatagccttattattgctaccctcactaagcgttttcagcttagtcaacaagtctagaaccaaatgaatcttaggattggttgtcgattcattcatgaacctatcgataatgagcgcatcaaatgatttagggttcgtaatgattttttttcaactcttggactaaatcatccatatcagtgtcagataccttctcaataatgatcttacagatggatttaacattttcatcaccctctcgtcgcgcgctcgatacggcttccatgaatggtgcaaatgccttgtgagagctagccttgatgaagctgtaagtcttggtgatctccataccatgagaaatgtaccggtgcataaatgaggatcttctcaccaaagtagctcccgatgagtttgcgagccggctttgctcggctttgcttgcgctcctcgttgtactcgaacatgtgctgaccgatgacactccgatcgctgcagtcgataaggatgttcttgaaaattggggtcatttcactgaagtagggtttgaggtgctctggtgtacggatatcacactcgaggaagccaaagatcttgtcatttacaatatcatcgacgatccctgtgtatgcttcgatggtagtcaaccgtccacatggcatctcattaccaagagcccacaaatacagagcattagcatcgtagccgatgatctttttgcagatcctaccccctcgaatcttggtctcgttgcgtttcgcgtatctgttgaagatgatagaaggaccaccagcaatgttcgccttcatcttggtgtagatgtccttctcctctctatcgatactgtacaccaacctgtctgagttgaattcaagtagcttcttgtggcggaagccctttagcgacatgttcttgcgagcaacgttgcatcccacacagctgatcaagatactaccatcgatgcgtccgagcttgttattgattcggtcagccgaggcagtatcagctgtgagttgcttgtagcatagcccacacaggtacttttgtcgctctagcaagtcgttgaggtgttctagcgtcatattgaattcacgatcggcatcagcatcctgggtcttatatccacttaagcgactagcgggaaagtcaaacgcttcagcaggctccttacttggttgctggaggttgttgaagcacgtctgatacatgactttctcagagagaccaggtagcgacacaccatcagtgaacatatcgagttcgaaacgtttgaatagttctcgctgggctttgatggccttgatgaagggtactacatcgaggttgttgtaccaaatgagtagatccttgattgacttcatgccatagtgttcccagacgaactgtacccgcacatagtcctcatcgctgatgctagtgctacgaagagcactgtcgaacgccgacttaggagggacttccggctgactgagtacgtcaaatgaagtaatgtattcgtacgggaagatgccttttcctaggccacagacgcatcgaatcttgtcatcacacttgcactcaccgagatatgtcgacaagtactttgcatagctggtgcctgccggaacataggagctaatgtcaagcattttcatgtctgacgtggcgatgcacatgtagctagggttcttgatgactgatgtgatgttgtcagtaccgatgactgcaaacaggtccgccttgataaggttgatgtcgtagcgtccagagttgaatccgaatactggtacctgaccaatgcactgcttcagcttgccataatccgagcggatcttaccgaatgtgagcttgctgtggaaatcgaagaaacaagcaaactccccgttctgaatccaagcattgacatcatccatcttgtacgtcttacccaagtctagaccaggaacctcagcgtcagtcaaaccatggacgttgatgattttgcggagcaaagactcgtacttcgagacgttgtactgctgaatcttagccgcaacttccttgatgtactggaacatatccttgagcaactccttcgggtcatcgctgacaaagcatcgcacctcctcagtcaagctgtcggccacggaaacagacacaggaatgtgttcgtttgtgaagatagtattctctccgtttttgacacccgtaggcttgaggatagcctcaaaatcatagacaatgaagtgatcgatgtaatggtcagcatccttgatggggtacttagtcagcatggaacgaatgctgttcggagcgggttggtagatggttggctgagctgggaacgattcgatgttcacgagttcgcattggtacttagtgtggctgcgtagcttatcagagctaacaaacaccatctcacacgtagagcattggtacttctgctggagcatatcaacgttcgtgatgtagagagcgtgattctcgtgcgacaggatgttgatcgaatcatagtccttgtccgagcagcgaatgcattcaaccttgcccgtctcaacatccatgttgaagacgttgatgttcagcttgaagcactcctcaagctcatcgaattggagaatgtcgataggcttgaaattgcggaacagacccagagtgtaggtgatctccttgtacgaacagtactgcttgaaggcttgtttcaccagagcctggattctgcgaggatccttcttggctccctcctgcttgtgataagcaatgcagtgggagacacacttgttgttcgtcttggggaagttgatgacgtgcttgttatcacgaatcaccttaggaatgacagcctcgctatcacccagagcatggtcgcgttggtagatatagaatttgcagccagtaatccccttcaccatgtacccggagctggggtagttgagcttgtcagccaactccatggagcgaatctccgagatcaccttacgaatatcagccttgctgttgatagctacaggagtgctaaatacagacgtgttgctaatattcggatggaagtagcgagtctcgctgtcatcagttctgctgacaagcttgtatccaagagcgatgttgaccttgaaggcagacttctgggttgcgagcacgttctcgagcttgtcgtagaactcagcaggctgaattccctcgtagaggtgcgactccatgttcttgccttggtagaagcggtacttactgtcttccttgaaatcagcagccacattcttttggagcttgcctagactgatctggtactcattttttggttggtggggtgggaaatgttgctaatgtataccatgcgccccgtcttgccacgtaccttaatacggtagctactaccccatcgaatgggttaaatatttaatcgctttaatccttcgagttcgtatgcaaacatgttgcctatatatgtttgactatattattatccgtagatatgactttataattatttgaccttgtatcaggatcgactttatatcttagtcatttacaaaatattctgaaattaattaaatcaaatatttggtttatacctttttggaggttttaagccattgtctttgactatattgggattaactttttgagaaaaaaaattaattaattaagttcggtttcattattaagttcgacttcaccatcaataagttcggttttgggtttacgcttgcgagctcgaatctggtctctattcttgtcgtcgtagctctttcgatacgacaagcgagcgtcgcgtgtgcgctgatagtagcgcttctgtgctgctttgatgcgttccttgctagcttggtattgctcaggagagtacgccatcattgtatattactaactttatattcattaggatgaaaaaaatgtcacttccccttgtgacatcgccgatgttccttgccagctaaaccaagtattaatggtgaagcagagaattggcagaatcgtgtattataagtttaaagtagtgtcgacggaccgccacgtcaaaatgaagctatccggtcctgtaatactgctgggtccaagcacacacgtagctagttgtcttccgacaggatggagtaaatcatgcccgcaatctgcttcactgattcaggtgcaggaacgtcattctccatcaccatcatcacgggtgtcgcacgctcaattttttcatccagacttctcgagaagacccattccaagaagttcgtgacaatgctgtacactttcggcagtccttctacatccgcaagtgcttcacttcccaagtaagcttgagcaagaccctgctggatatcgtcacgtttcgcttccacaatgcaaactcgtttctcgccgcgcttaagcacgaactcaaaggctccgtctccgtgaacacgtttcccaatcacggtttcttcggccaggatttggacgcctccatcgaacagcgcacagacacttgcaagcacgggcacgatgaagtgcagtcgctttccagtaatgatatctccaaaagccttgatcaagataggaaagtatctatgcagcgcatcaagcttttcgtcagggataggctttgacgatggtcgaaacttggtcgctggcatgatgctgtcaatctccgggaacgacacgtacgagaaacccgtggagccggcagccttcttcgctttcttgttcttatcaagaacctcgttcaacttgtcccatcgtctcttgcgactcgggtgcagtgcaatttcagcgtcctggacttcaaggcactcccgatctgcaaccaccagcacgtgaatcgtcttcttcgtcggagcaccttcaaacacgtcgccaatctcgtctgctgggtccatttccacgttcagcagtgtcttcacgtgctcaggaatgcctccacttcgcatagaaatcatatcagggtccttcgatgagagccacgcgccgctctccgtcttcgccaggaagagctgcagcttgtctgcgtcgatgtccttgaagtcgttcggcttctccaccttgatcgccttcttcaagagagcaaccgtcttccattcttcaaggatggtagaaatcacgcccccgtccccaacgagcatgcagttcaacagcagcatctttcctcgagccggcagattctggaatgaggaagaaggagggacttaagcggacatgaaggtgtgtgacatagattttcaaccaatgatgagacgccacgtcgcgctggtccgaactaatccttgaggtaaaaatctgttctattgcttttatcaatatagtttgaacgttgtcggtcgaaacaaaaggaagaacacttgagcagtagttggcaaaatgcaaagtgattcgattcaggtccttagttcgcaaccgcgtgctacctctaagcctgctactggatacctcttactggatacaccctactggattctctactggatacacagttaccttatccaatcagagaacgccacgtcgatgcccatcttgtacccacaatcttggcgtaatcaccgtgacgtagtcatcgtcccgtaatcacctgaatgattgcggtacaacacagtgaaggtcacgccgacctcactgatgacgcgttcgcgtcacacggtcgcttggcgaggcgtcgtcacatcagtcttgataacagcgaccacgatgcccagcttcgtcctgagcgcgtcgaactgcggcgccgcgatcggcttcgtcatgatgtccgccagcatgtcgagtgtcgaaacatactgcaacaccacttgaccgtcttccaccttctcgcgcacgaagtggtagcgaatgtcgatgtgcttggtgcgcttgtggaactccgggttcttggccaacgcgatggagccttggttgtcctcgtagatcttcaccgcttcatcgctcgccatctcgcccagctcgcacagaaacaccttgagccacaccgcctcctgcgtggcctccgacagcgccatgtactcggcttccgtcgacgagagcgccaccgtgcgctgcttcttgcttcgccagctgatgcatccgccgttcatcatgaacgcgtagccgctcgtactccgtcgagactcgatgtcgccggcccagtccgcgtccgagtagccttgcagtccgtcctcgctgctcgcttgaaacacgaggccgtgcgtcttcgtgcctcggatgtagcggaagaccctcttgagcgcctgccagtgtgtcggacatgggtccgctgcgaactggctcagcactcccactgccgctgcgaggtccggacgagtccccaccatgagatacatgaggcagcccacggcgttccggtacggaacattcgccatggtctcgtcgtgcttgcagcctccctcgcacatggtcttggtcagcttcagatccggatcctgcggtgtcttcacagggttgctctcatccatcttgaacttctcgagaatgtccttcgcgaacttggtctgccgcaccgacaccttcccagtcgccacatcttgctcgatctccataccgagaaagtacttgagctggcccatgtcggtcatctcgaaccggtcactcagcgcctgcttcgtgtccttcagcatcccgtcgctgctactggcgaggaccagatcgtccacgtacagtgccacgaacatcatgtcgtgattgtcccgcttcaagtagatgcagtggtcggactcgcacttcttgaaccccagcttcaacatgaactcgtcgattgtcttgttccacgtccgcggcgactgcttcaggccgtacagcgaacgcttgagccggcacacgtagtcgggtcgatctccgtccacatatccgtccggctgcgccatgtagatgtcctcgtccaacaagccgttgaggaacgcggtcttcacatccatctggtgcactgtgagcttgtacttggccgccagactcagcaacacccaaatcgacgtgaacttgaccaccggcgcgaacgtctcgtcgtagtcgatgccgtacttctgcgagaaccacttcgccaccagtcgcgccttgaaccgctcgatctctccagactggttctccttcacgcggaacacccatctgcagccgatcgccttgcgtcccttcggcagtggcaccagggtccacgtctcgttcttgcggggcgactccacctccgagtcgcacgcctctttcctcttgtctgcgtcgctggattccatcaccgacttgaacgttgtcggcatctctcccactgaatccacgacgtacgcagcctagaagtcttccttctcttgtgctgcggcagacatctcgtccagcggctgctgtcgtctcggcaccgcataccgcttgacactcggaagctccacggcttcctcgagcgactgcgtgcgcgggtgtcgcttgctgccgggttcaaagtcttgattccgcgcagcttcttctctgttctcgtctgatccggactgagtctcttcatccgtggtgtcttcatcatcatctgtcggaagacccaccaacacctccttcgaagcgtagtcgcgtctcccactgtcgaagacatcctccatgaactgcgcgtcgcggctcaccaacacgcgaccgctctcgatctcctcgaaccgatacgccttctcgtgctccgagtacccgaggaaacgacagcgcaccgaccgagcgtcgaacttcgaccgcttctccttcggcacgtgcacgtacgcgtggcacccgaacaccttgaggttggccagcaaaggcttcttgccggtccaaacgtggtgcggcaacttgtcgtgactgatggcgcgcgtcggacaccggttgcggaggaccgtggccgtcatcaccgcttctccccagtactccttcgacaacccggcgtgctccagcatgcagcgcgcacactccaccagcgtccgattcattcgctcggccactccgttgagctgaggcgtgtatggtggcgtgagcttctgctcgatgccgcgatccgcacacaacttggccatcgcacccgaagtgtactcgccgccgttgtcgctccgaagcaccttcactcgcttgccggtctgcgtctcagccaacgcgacgaacgcagcgaacttggcagccacctccgacttgttccgtagcaggtacaccacgcagaagtgcgacttgtcgtcgatgaacgtgacgaagtagcgcttgcctccgaacgtcgccgtctgcatcggaccgcgcacatcgctgtggaccacctccagcacttgcttcgtacggttcggcgacgacttcatgaagcttactcgcgtttgcttgccgagtgcgcacccgtcgcacacctcccactgtttcaccgacgtcattgggatgccagtgccgtagcccttcttgacgatggcgtcgagaccaccatggccgatgtgaccaagtcgaaggtgccagaggtacgacgtggtgtccccttggcgattcttcgagcttgccgcattggcctcgtcagcaggcgtcctcggcgtcatgcagagcttgaacagtcctttgccttcgcgagcgccgagcttccacttgagacccttcgtttccgcgaagcacccgtcgctctcgaaggtcactggcccgacgtccttggtgaagcggccgacggagaacaggttgcgcgacagcttcgggatgtgccacacacccgtgagcacacccttcttcatgccgcgcggtgtctgcatcgacatcacgatgtcgccgctccccaccgcctgaaccacgccgtcgtccgccagatgcacgtccaccggagagatcttcttgtagttcttcatgtactccttcgagtacgtcatgtgctgtcgcactcgagtcgaccagccacatgccgctcagcttggaggcacccgtgtcgccaccaaccgagaagaggaagtcgccagagtcatcttcgacctgcgcgacgttcgctcgttgcggcctctgccgctccccgttctcgcggatccgcaccggacacttggcgatccaatgtccgtgctcgccgcagtagtgacaggcgctcgtcctctgcgcttgcgcctgccgtcccttgcgcttcccgttgtcgcttgtcatgaacgcttgaccttgagcgtgcgcggttccgtcagcaccgccaccttgttccttgcgcttcatgtcctcgtgcaggagccgagacgtcacgagctcccacgtcagcgtgtcggaacgcgattccaacgccgtgatgaggaactggtacgactcgctcagactggcaagaagcgtgatcaccaagtcgtcctcgctgaccggagcgccgaccgcgtcgagctgttccgccagcgtcttgagcttgttaatgtgctccagcacatcatcaccttcgtccatcgttgtcgtgaagaaccgtcgacgaagaaagagcttgttcgccaggctcttcttctcgaagtgtccctcgagtcttgaccatgcatcatgcgcgtccttcgccgaccgcaccagcggcagctgcgagtcctccaacgcgagacagacgatcgccagcgccttgcgcgacttcttgcgaaacgtcgcttggtccgccgcggtcgtgcactgctcgagcttcacttccccactcgtcacttcccacagttcgcgctcctccagcaccatctgcatcttgaacttccatgtgtggaagttggttccgtcgaacttgttgatgcgggcggtcgcggtcggggcggcgtccatggcgaaggcgtagtcggggtcttggtcagggaagnnnnnnnnnnnnnnnnnnnnnnnnnnnnnnnnnnnnnnnnnnnnnnnnnnnnnnnnnnnnnnnnnnnnnnnnnnnnnnnnnnnnnnnnnnnnnnnnnnnnnnnnnnnnnnnnnnnnnnnnnnnnnnnnnnnnnnnnnnnnnnnnnnnnnnnnnnnnnnnnnnnnnnnnnnnnnnnnnnnnnnnnnnnnnnnnnnnnnnnnnnnnnnnnnnnnnnnnnnnnnnnnnnnnnnnnnnnnnnnnnnnnnnnnnnnnnnnnnnnnnnnnnnnnnnnnnnnnnnnnnnnnnnnnnnnnnnnnnnnnnnnnnnnnnnnnnnnnnnnnnnnnnnnnnnnnnnnnnnnnnnnnnnnnnnnnnnnnnnnnnnnnnnnnnnnnnnnnnnnnnnnnnnnnnnnnnnnnnnnnnnnnnnnnnnnnnnnnnnnnnnnnnnnnnnnnnnnnnnnnnnnnnnnnnnnnnnnnnnnnnnnnnnnnnnnnnnnnnnnnnnnnnnnnnnnnnnnnnnnnnnnnnnnnnnnnnnnnnnnnnnnnnnnnnnnnnnnnnnnnnnnnnnnnnnnnnnnnnnnnnnnnnnnnnnnnnnnnnnnnnnnnnnnnnnnnnnnnnnnnnnnnnnnnnnnnnnnnnnnnnnnnnnnnnnnnnnnnnnnnnnnnnnnnnnnnnnnnnnnnnnnnnnnnnnnnnnnnnnnnnnnnnnnnnnnnnnnnnnnnnnnnnnnnnnnnnnnnnnnnnnnnnnnnnnnnnnnnnnnnnnnnnnnnnnnnnnnnnnnnnnnnnnnnnnnnnnnnnnnnnnnnnnnnnnnnnnnnnnnnnnnnnnnnnnnnnnnnnnnnnnnnnnnnnnnnnnnnnnnnnnnnnnnnnnnnnnnnnnnnnnnnnnnnnnnnnnnnnnnnnnnnnnnnnnnnnnnnnnnnnnnnnnnnnnnnnnnnnnnnnnnnnnnnnnnnnnnnnnnnnnnnnnnnnnnnnnnnnnnnnnnnnnnnnnnnnnnnnnnnnnnnnnnnnnnnnnnnnnnnnnnnnnnnnnnnnnnnnnnnnnnnnnnnnnnnnnnnnnnnnnnnnnnnnnnnnnnnnnnnnnnnnnnnnnnnnnnnnnnnnnnnnnnnnnnnnnnnnnnnnnnnnnnnnnnnnnnnnnnnnnnnnnnnnnnnnnnnnnnnnnnnnnnnnnnnnnnnnnnnnnnnnnnnnnnnnnnnnnnnnnnnnnnnnnnnnnnnnnnnnnnnnnnnnnnnnnnnnnnnnnnnnnnnnnnnnnnnnnnnnnnnnnnnnnnnnnnnnnnnnnnnnnnnnnnnnnnnnnnnnnnnnnnnnnnnnnnnnnnnnnnnnnnnnnnnnnnnnnnnnnnnnnnnnnnnnnnnnnnnnnnnnnnnnnnnnnnnnnnnnnnnnnnnnnnnnnnnnnnnnnnnnnnnnnnnnnnnnnnnnnnnnnnnnnnnnnnnnnnnnnnnnnnnnnnnnnnnnnnnnnnnnnnnnnnnnnnnnnnnnnnnnnnnnnnnnnnnnnnnnnnnnnnnnnnnnnnnnnnnnnnnnnnnnnnnnnnnnnnnnnnnnnnnnnnnnnnnnnnnnnnnnnnnnnnnnnnnnnnnnnnnnnnnnnnnnnnnnnnnnnnnnnnnnnnnnnnnnnnnnnnnnnnnnnnnnnnnnnnnnnnnnnnnnnnnnnnnnnnnnnnnnnnnnnnnnnnnnnnnnnnnnnnnnnnnnnnnnnnnnnnnnnnnnnnnnnnnnnnnnnnnnnnnnnnnnnnnnnnnnnnnnnnnnnnnnnnnnnnnnnnnnnnnnnnnnnnnnnnnnnnnnnnnnnnnnnnnnnnnnnnnnnnnnnnnnnnnnnnnnnnnnnnnnnnnnnnnnnnnnnnnnnnnnnnnnnnnnnnnnnnnnnnnnnnnnnnnnnnnnnnnnnnnnnnnnnnnnnnnnnnnnnnnnnnnnnnnnnnnnnnnnnnnnnnnnnnnnnnnnnnnnnnnnnnnnnnnnnnnnnnnnnnnnnnnnnnnnnnnnnnnnnnnnnnnnnnnnnnnnnnnnnnnnnnnnnnnnnnnnnnnnnnnnnnnnnnnnnnnnnnnnnnnnnnnnnnnnnnnnnnnnnnnnnnnnnnnnnnnnnnnnnnnnnnnnnnnnnnnnnnnnnnnnnnnnnnnnnnnnnnnnnnnnnnnnnnnnnnnnnnnnnnnnnnnnnnnnnnnnnnnnnnnnnnnnnnnnnnnnnnnnnnnnnnnnnnnnnnnnnnnnnnnnnnnnnnnnnnnnnnnnnnnnnnnnnnnnnnnnnnnnnnnnnnnnnnnnnnnnnnnnnnnnnnnnnnnnnnnnnnnnnnnnnnnnnnnnnnnnnnnnnnnnnnnnnnnnnnnnnnnnnnnnnnnnnnnnnnnnnnnnnnnnnnnnnnnnnnnnnnnnnnnnnnnnnnnnnnnnnnnnnnnnnnnnnnnnnnnnnnnnnnnnnnnnnnnnnnnnnnnnnnnnnnnnnnnnnnnnnnnnnnnnnnnnnnnnnnnnnnnnnnnnnnnnnnnnnnnnnnnnnnnnnnnnnnnnnnnnnnnnnnnnnnnnnnnnnnnnnnnnnnnnnnnnnnnnnnnnnnnnnnnnnnnnnnnnnnnnnnnnnnnnnnnnnnnnnnnnnnnnnnnnnnnnnnnnnnnnnnnnnnnnnnnnnnnnnnnnnnnnnnnnnnnnnnnnnnnnnnnnnnnnnnnnnnnnnnnnnnnnnnnnnnnnnnnnnnnnnnnnnnnnnnnnnnnnnnnnnnnnnnnnnnnnnnnnnnnnnnnnnnnnnnnnnnnnnnnnnnnnnnnnnnnnnnnnnnnnnnnnnnnnnnnnnnnnnnnnnnnnnnnnnnnnnnnnnnnnnnnnnnnnnnnnnnnnnnnnnnnnnnnnnnnnnnnnnnnnnnnnnnnnnnnnnnnnnnnnnnnnnnnnnnnnnnnnnnnnnnnnnnnnnnnnnnnnnnnnnnnnnnnnnnnnnnnnnnnnnnnnnnnnnnnnnnnnnnnnnnnnnnnnnnnnnnnnnnnnnnnnnnnnnnnnnnnnnnnnnnnnnnnnnnnnnnnnnnnnnnnnnnnnnnnnnnnnnnnnnnnnnnnnnnnnnnnnnnnnnnnnnnnnnnnnnnnnnnnnnnnnnnnnnnnnnnnnnnnnnnnnnnnnnnnnnnnnnnnnnnnnnnnnnnnnnnnnnnnnnnnnnnnnnnnnnnnnnnnnnnnnnnnnnnnnnnnnnnnnnnnnnnnnnnnnnnnnnnnnnnnnnnnnnnnnnnnnnnnnnnnnnnnnnnnnnnnnnnnnnnnnnnnnnnnnnnnnnnnnnnnnnnnnnnnnnnnnnnnnnnnnnnnnnnnnnnnnnnnnnnnnnnnnnnnnnnnnnnnnnnnnnnnnnnnnnnnnnnnnnnnnnnnnnnnnnnnnnnnnnnnnnnnnnnnnnnnnnnnnnnnnnnnnnnnnnnnnnnnnnnnnnnnnnnnnnnnnnnnnnnnnnnnnnnnnnnnnnnnnnnnnnnnnnnnnnnnnnnnnnnnnnnnnnnnnnnnnnnnnnnnnnnnnnnnnnnnnnnnnnnnnnnnnnnnnnnnnnnnnnnnnnnnnnnnnnnnnnnnnnnnnnnnnnnnnnnnnnnnnnnnnnnnnnnnnnnnnnnnnnnnnnnnnnnnnnnnnnnnnnnnnnnnnnnnnnnnnnnnnnnnnnnnnnnnnnnnnnnnnnnnnnnnnnnnnnnnnnnnnnnnnnnnnnnnnnnnnnnnnnnnnnnnnnnnnnnnnnnnnnnnnnnnnnnnnnnnnnnnnnnnnnnnnnnnnnnnnnnnnnnnnnnnnnnnnnnnnnnnnnnnnnnnnnnnnnnnnnnnnnnnnnnnnnnnnnnnnnnnnnnnnnnnnnnnnnnnnnnnnnnnnnnnnnnnnnnnnnnnnnnnnnnnnnnnnnnnnnnnnnnnnnnnnnnnnnnnnnnnnnnnnnnnnnnnnnnnnnnnnnnnnnnnnnnnnnnnnnnnnnnnnnnnnnnnnnnnnnnnnnnnnnnnnnnnnnnnnnnnnnnnnnnnnnnnnnnnnnnnnnnnnnnnnnnnnnnnnnnnnnnnnnnnnnnnnnnnnnnnnnnnnnnnnnnnnnnnnnnnnnnnnnnnnnnnnnnnnnnnnnnnnnnnnnnnnnnnnnnnnnnnnnnnnnnnnnnnnnnnnnnnnnnnnnnnnnnnnnnnnnnnnnnnnnnnnnnnnnnnnnnnnnnnnnnnnnnnnnnnnnnnnnnnnnnnnnnnnnnnnnnnnnnnnnnnnnnnnnnnnnnnnnnnnnnnnnnnnnnnnnnnnnnnnnnnnnnnnnnnnnnnnnnnnnnnnnnnnnnnnnnnnnnnnnnnnnnnnnnnnnnnnnnnnnnnnnnnnnnnnnnnnnnnnnnnnnnnnnnnnnnnnnnnnnnnnnnnnnnnnnnnnnnnnnnnnnnnnnnnnnnnnnnnnnnnnnnnnnnnnnnnnnnnnnnnnnnnnnnnnnnnnnnnnnnnnnnnnnnnnnnnnnnnnnnnnnnnnnnnnnnnnnnnnnnnnnnnnnnnnnnnnnnnnnnnnnnnnnnnnnnnnnnnnnnnnnnnnnnnnnnnnnnnnnnnnnnnnnnnnnnnnnnnnnnnnnnnnnnnnnnnnnnnnnnnnnnnnnnnnnnnnnnnnnnnnnnnnnnnnnnnnnnnnnnnnnnnnnnnnnnnnnnnnnnnnnnnnnnnnnnnnnnnnnnnnnnnnnnnnnnnnnnnnnnnnnnnnnnnnnnnnnnnnnnnnnnnnnnnnnnnnnnnnnnnnnnnnnnnnnnnnnnnnnnnnnnnnnnnnnnnnnnnnnnnnnnnnnnnnnnnnnnnnnnnnnnnnnnnnnnnnnnnnnnnnnnnnnnnnnnnnnnnnnnnnnnnnnnnnnnnnnnnnnnnnnnnnnnnnnnnnnnnnnnnnnnnnnnnnnnnnnnnnnnnnnnnnnnnnnnnnnnnnnnnnnnnnnnnnnnnnnnnnnnnnnnnnnnnnnnnnnnnnnnnnnnnnnnnnnnnnnnnnnnnnnnnnnnnnnnnnnnnnnnnnnnnnnnnnnnnnnnnnnnnnnnnnnnnnnnnnnnnnnnnnnnnnnnnnnnnnnnnnnnnnnnnnnnnnnnnnnnnnnnnnnnnnnnnnnnnnnnnnnnnnnnnnnnnnnnnnnnnnnnnnnnnnnnnnnnnnnnnnnnnnnnnnnnnnnnnnnnnnnnnnnnnnnnnnnnnnnnnnnnnnnnnnnnnnnnnnnnnnnnnnnnnnnnnnnnnnnnnnnnnnnnnnnnnnnnnnnnnnnnnnnnnnnnnnnnnnnnnnnnnnnnnnnnnnnnnnnnnnnnnnnnnnnnnnnnnnnnnnnnnnnnnnnnnnnnnnnnnnnnnnnnnnnnnnnnnnnnnnnnnnnnnnnnnnnnnnnnnnnnnnnnnnnnnnnnnnnnnnnnnnnnnnnnnnnnnnnnnnnnnnnnnnnnnnnnnnnnnnnnnnnnnnnnnnnnnnnnnnnnnnnnnnnnnnnnnnnnnnnnnnnnnnnnnnnnnnnnnnnnnnnnnnnnnnnnnnnnnnnnnnnnnnnnnnnnnnnnnnnnnnnnnnnnnnnnnnnnnnnnnnnnnnnnnnnnnnnnnnnnnnnnnnnnnnnnnnnnnnnnnnnnnnnnnnnnnnnnnnnnnnnnnnnnnnnnnnnnnnnnnnnnnnnnnnnnnnnnnnnnnnnnnnnnnnnnnnnnnnnnnnnnnnnnnnnnnnnnnnnnnnnnnnnnnnnnnnnnnnnnnnnnnnnnnnnnnnnnnnnnnnnnnnnnnnnnnnnnnnnnnnnnnnnnnnnnnnnnnnnnnnnnnnnnnnnnnnnnnnnnnnnnnnnnnnnnnnnnnnnnnnnnnnnnnnnnnnnnnnnnnnnnnnnnnnnnnnnnnnnnnnnnnnnnnnnnnnnnnnnnnnnnnnnnnnnnnnnnnnnnnnnnnnnnnnnnnnnnnnnnnnnnnnnnnnnnnnnnnnnnnnnnnnnnnnnnnnnnnnnnnnnnnnnnnnnnnnnnnnnnnnnnnnnnnnnnnnnnnnnnnnnnnnnnnnnnnnnnnnnnnnnnnnnnnnnnnnnnnnnnnnnnnnnnnnnnnnnnnnnnnnnnnnnnnnnnnnnnnnnnnnnnnnnnnnnnnnnnnnnnnnnnnnnnnnnnnnnnnnnnnnnnnnnnnnnnnnnnnnnnnnnnnnnnnnnnnnnnnnnnnnnnnnnnnnnnnnnnnnnnnnnnnnnnnnnnnnnnnnnnnnnnnnnnnnnnnnnnnnnnnnnnnnnnnnnnnnnnnnnnnnnnnnnnnnnnnnnnnnnnnnnnnnnnnnnnnnnnnnnnnnnnnnnnnnnnnnnnnnnnnnnnnnnnnnnnnnnnnnnnnnnnnnnnnnnnnnnnnnnnnnnnnnnnnnnnnnnnnnnnnnnnnnnnnnnnnnnnnnnnnnnnnnnnnnnnnnnnnnnnnnnnnnnnnnnnnnnnnnnnnnnnnnnnnnnnnnnnnnnnnnnnnnnnnnnnnnnnnnnnnnnnnnnnnnnnnnnnnnnnnnnnnnnnnnnnnnnnnnnnnnnnnnnnnnnnnnnnnnnnnnnnnnnnnnnnnnnnnnnnnnnnnnnnnnnnnnnnnnnnnnnnnnnnnnnnnnnnnnnnnnnnnnnnnnnnnnnnnnnnnnnnnnnnnnnnnnnnnnnnnnnnnnnnnnnnnnnnnnnnnnnnnnnnnnnnnnnnnnnnnnnnnnnnnnnnnnnnnnnnnnnnnnnnnnnnnnnnnnnnnnnnnnnnnnnnnnnnnnnnnnnnnnnnnnnnnnnnnnnnnnnnnnnnnnnnnnnnnnnnnnnnnnnnnnnnnnnnnnnnnnnnnnnnnnnnnnnnnnnnnnnnnnnnnnnnnnnnnnnnnnnnnnnnnnnnnnnnnnnnnnnnnnnnnnnnnnnnnnnnnnnnnnnnnnnnnnnnnnnnnnnnnnnnnnnnnnnnnnnnnnnnnnnnnnnnnnnnnnnnnnnnnnnnnnnnnnnnnnnnnnnnnnnnnnnnnnnnnnnnnnnnnnnnnnnnnnnnnnnnnnnnnnnnnnnnnnnnnnnnnnnnnnnnnnnnnnnnnnnnnnnnnnnnnnnnnnnnnnnnnnnnnnnnnnnnnnnnnnnnnnnnnnnnnnnnnnnnnnnnnnnnnnnnnnnnnnnnnnnnnnnnnnnnnnnnnnnnnnnnnnnnnnnnnnnnnnnnnnnnnnnnnnnnnnnnnnnnnnnnnnnnnnnnnnnnnnnnnnnnnnnnnnnnnnnnnnnnnnnnnnnnnnnnnnnnnnnnnnnnnnnnnnnnnnnnnnnnnnnnnnnnnnnnnnnnnnnnnnnnnnnnnnnnnnnnnnnnnnnnnnnnnnnnnnnnnnnnnnnnnnnnnnnnnnnnnnnnnnnnnnnnnnnnnnnnnnnnnnnnnnnnnnnnnnnnnnnnnnnnnnnnnnnnnnnnnnnnnnnnnnnnnnnnnnnnnnnnnnnnnnnnnnnnnnnnnnnnnnnnnnnnnnnnnnnnnnnnnnnnnnnnnnnnnnnnnnnnnnnnnnnnnnnnnnnnnnnnnnnnnnnnnnnnnnnnnnnnnnnnnnnnnnnnnnnnnnnnnnnnnnnnnnnnnnnnnnnnnnnnnnnnnnnnnnnnnnnnnnnnnnnnnnnnnnnnnnnnnnnnnnnnnnnnnnnnnnnnnnnnnnnnnnnnnnnnnnnnnnnnnnnnnnnnnnnnnnnnnnnnnnnnnnnnnnnnnnnnnnnnnnnnnnnnnnnnnnnnnnnnnnnnnnnnnnnnnnnnnnnnnnnnnnnnnnnnnnnnnnnnnnnnnnnnnnnnnnnnnnnnnnnnnnnnnnnnnnnnnnnnnnnnnnnnnnnnnnnnnnnnnnnnnnnnnnnnnnnnnnnnnnnnnnnnnnnnnnnnnnnnnnnnnnnnnnnnnnnnnnnnnnnnnnnnnnnnnnnnnnnnnnnnnnnnnnnnnnnnnnnnnnnnnnnnnnnnnnnnnnnnnnnnnnnnnnnnnnnnnnnnnnnnnnnnnnnnnnnnnnnnnnnnnnnnnnnnnnnnnnnnnnnnnnnnnnnnnnnnnnnnnnnnnnnnnnnnnnnnnnnnnnnnnnnnnnnnnnnnnnnnnnnnnnnnnnnnnnnnnnnnnnnnnnnnnnnnnnnnnnnnnnnnnnnnnnnnnnnnnnnnnnnnnnnnnnnnnnnnnnnnnnnnnnnnnnnnnnnnnnnnnnnnnnnnnnnnnnnnnnnnnnnnnnnnnnnnnnnnnnnnnnnnnnnnnnnnnnnnnnnnnnnnnnnnnnnnnnnnnnnnnnnnnnnnnnnnnnnnnnnnnnnnnnnnnnnnnnnnnnnnnnnnnnnnnnnnnnnnnnnnnnnnnnnnnnnnnnnnnnnnnnnnnnnnnnnnnnnnnnnnnnnnnnnnnnnnnnnnnnnnnnnnnnnnnnnnnnnnnnnnnnnnnnnnnnnnnnnnnnnnnnnnnnnnnnnnnnnnnnnnnnnnnnnnnnnnnnnnnnnnnnnnnnnnnnnnnnnnnnnnnnnnnnnnnnnnnnnnnnnnnnnnnnnnnnnnnnnnnnnnnnnnnnnnnnnnnnnnnnnnnnnnnnnnnnnnnnnnnnnnnnnnnnnnnnnnnnnnnnnnnnnnnnnnnnnnnnnnnnnnnnnnnnnnnnnnnnnnnnnnnnnnnnnnnnnnnnnnnnnnnnnnnnnnnnnnnnnnnnnnnnnnnnnnnnnnnnnnnnnnnnnnnnnnnnnnnnnnnnnnnnnnnnnnnnnnnnnnnnnnnnnnnnnnnnnnnnnnnnnnnnnnnnnnnnnnnnnnnnnnnnnnnnnnnnnnnnnnnnnnnnnnnnnnnnnnnnnnnnnnnnnnnnnnnnnnnnnnnnnnnnnnnnnnnnnnnnnnnnnnnnnnnnnnnnnnnnnnnnnnnnnnnnnnnnnnnnnnnnnnnnnnnnnnnnnnnnnnnnnnnnnnnnnnnnnnnnnnnnnnnnnnnnnnnnnnnnnnnnnnnnnnnnnnnnnnnnnnnnnnnnnnnnnnnnnnnnnnnnnnnnnnnnnnnnnnnnnnnnnnnnnnnnnnnnnnnnnnnnnnnnnnnnnnnnnnnnnnnnnnnnnnnnnnnnnnnnnnnnnnnnnnnnnnnnnnnnnnnnnnnnnnnnnnnnnnnnnnnnnnnnnnnnnnnnnnnnnnnnnnnnnnnnnnnnnnnnnnnnnnnnnnnnnnnnnnnnnnnnnnnnnnnnnnnnnnnnnnnnnnnnnnnnnnnnnnnnnnnnnnnnnnnnnnnnnnnnnnnnnnnnnnnnnnnnnnnnnnnnnnnnnnnnnnnnnnnnnnnnnnnnnnnnnnnnnnnnnnnnnnnnnnnnnnnnnnnnnnnnnnnnnnnnnnnnnnnnnnnnnnnnnnnnnnnnnnnnnnnnnnnnnnnnnnnnnnnnnnnnnnnnnnnnnnnnnnnnnnnnnnnnnnnnnnnnnnnnnnnnnnnnnnnnnnnnnnnnnnnnnnnnnnnnnnnnnnnnnnnnnnnnnnnnnnnnnnnnnnnnnnnnnnnnnnnnnngtacaagccgtcgaccggctcgcagcagcagcagcagccttccaagggcaacggctcgcagcagcagtcccagacgggcgagtccgaggagcagcagcagcaacagcagtcgtctcagacgaacgactccgagcaacaacaggagcaggagcagcagcaagaccagggccaggagcagcagcagcagcagcaggaccagggctcgaggaagctggctgtccagacgagcaacctggagaaggagtggcagcagaccaccggcaacttcggcgtcggtaagctggactaagcgaaccttatccttctgatagaggagctatagagttgatgcgtggtgcgtgatatatcgtaaaagtcaatactaatctagatgtcattgagaaacttcgagtgttgtttattgtattaaaaaatcacactcccatactcatttttttgtattgtgagctatcgaaaaacatatcggttgtatggcacttcgaagtacggcggcaaaatatctaaacattgaagcgagccaggacgctgcttaatttgattgcaaggttgctcggtcaccctcagcgactccattgttacactcactgcgtcaatatcgcggtcctttacgatgccttcctgtctggtggtgaaccattccccagggtctttaggtgacctgacggttcttttgatttatagactttcgattagctgtccattgagtcagcttgagattttgatcaaaatagagggctttgctaaagttttttttttcgaaagtcgaagggagcagtggcagtgtcgatctggcgaccttccttccttccttccttgcgtggtgcgctctacgatcagtacatatacagtactctaccttatcttcagatgtgtgccagccgcaattcgagatccgacttcaacaaaagcgcgactagcttattactaattctctcatatttaatatcaactgggcgatccgatcgttcgctggtgacagcttttgcagctgttttcgttgatcactttaatctgtggctgtcaatccacgattgtgaaagtcacgcgcatggattgccgcgcatgacttacgcgatctcaagccatgtggtggcaaaggatggcacatcgcacaccggcgaatcgtgaaataaccgtgcattaacggatctcaaattcgcaccaattggaatcaccacaactgaactttacatcggggcgtttaacgcaacgttcaattcgcttcaaccatctaaagcggcgcgatcgttggtacatgtaactaacgaatacgtctgcctcaacttccaacgcacagaggtaactttctccttctgccttgtgcaatttaaaatgaaagtaggatttagcattatgtcgaagcgtggacgtatacaatgtgcttgaaacacccaacacgggcattgcacatagagacaacgtcacagttaatcgagaagggatatcttattttctaccaacgggccagcagaccgcgcgtataaccataacctggcaagttatctagacgcttctcgttggcctccattttaaatgagatcgttccgccgtgtatatcccatctagtatcgatgttagcgagatacctacttcacagaataaatgcttaacaacaacactgcttgcagtttgaagtgctcctcggatgattttggattaaattttacgttttagccgatcaaaatgcagtattgtggaaaatcttaaacaaaaactgcagttttagaaaataaatcggggcgttttaacgtgaagataagtgcggttctaaaatctcaaaaagcacttgtttagtaaagtacggtatgagtcaacagccgcaatgttgtccaccaccagcgagcctttccggcaaccactgtatcaataccagcttactgatgggagaattagagcttgcggtatgtaaaacagtacggttatgctaacacaagcattttattgtaaaccactccaattttgaagtttccaatggtgctatgagtcaggaggccgaagaatcagctgattgtctctgaaaagaggacaacctatggtaccaatatcaaatagctcgtggggtctacattggacgtatttattgtgctttgcaatgattttggcaatatggggcgaaatttgctgtatttataacgaccacctgctagatttacgataaatcgaggtgcataaatgggtggaggcctagaattaaatgtacacatgtatgagcaaatgtattgaagtgttggtctatgacctacatagaacgcagctaaagctcagtaggggaacggaaggttaattcaccttcgccctcgtcctgtgtctctccacgaaaatccagatgctcgcctggtgcagcggtacagtgcttcccggtctcatcgctatcctcctgctcatgaaagattaacttggacatgataaggtatgttattggggtctattcagtaccggtggtatattttgagggtggtccttcatcgacagcacttaggtatgagggtttaacttgccccgagggtaccaatatggaggccaaaaattaaataaataattcgcgatttggtcggtacatgtatcatttgcgggaacccgggttcccgccaattgtttcacatgctaacatgtaaaatgctgttagaggcgaggagtcggaaaagctgtcgctggctatgtcgccggcaccccataactatttacgcatgcttgcagctatagtcgagtgtatggatagtgacattaaggggtggtccgcacaaaaagtaaaacgatgatcacgcccttagacgtctttctcaatttagtggtcctgaccccagccactccgcgtgttgtggtcgtttacctcccaacttaaaaaaaagaaacagctactatacagcagctgtgaatctctgcatttggcgccttgattttgcgttccataccatgaaatatccgactataggacctatccgacctgtaccaaaaccatggtaccctagaaggatggactctaaaaacaaatatataagtttgtatattatgttgtgggccacaccgattacacttttgctcatttttatgggaaacgtcaaaaggtgtatgcgttgggaaaacgtttgtcaataggtgtagtggtcgtgggcgtcacgtcgcgtcatgtctcatcatacacgtactgacacacgttttggttgccgcggtatttcggccgaggtcgggtcatacagacccaggatcgagcttccaagcacagtagtttattacgacacgctcgtagcgaacacggtcaactaataatagcatatagagcaactgtactcgacaacttcgctattgtgtctataaggaactaccaacgcaaaccgcaagcgtctatagcatggctgtactaggtaggttttgcatctgaatttcggaggtgaaggagctctagtgagagcccccaaccggaagagagtgtaggtattgtagaactgtggcaacgctgaggcctggctacaatggataacgacgttcattgtagtccctcagccgtacaattcgctatcaaagtcatggacaccacgaaccgggctagttgcatcaggtagaagccttcctaaccccgggttttatggatttggatctaagcccacacaccagtcttgctgatgcagctttatcatgcaccttagtgcgcttggaaccacatacacatactgtcataccgacaacctagcatacacctaatgacacgagttaaccgcttttgacaaaacgtttcaaattcatacatcttttgacattttccccatttttattctagcgttgggtggcgggcttgcgtggagggcagagtgccggaggccgcggcggtggcgccgagggaatccggccgcaggaaggcagcggcaggtagcaggctccaggacgacggtgaagccgcaggacgacggcggcaggaaggactggcgaagcggtggcaggtcggcggagcggaggcaggtcggtggctggctggacggcgaggcggcggcggcagggaggcagcagtaggacgtcgactggttggtggggcggtggcggggcggacggctgcccggagaaccttgatgacttgccaccacgctgcattgttataagattattcgttatataataaacgtatatttaataaaactcctccactgttaatgtacatgcctagcggcttcccttacgcgctcattatacacaccatgcacgctcatacattgctacatcacgacgtagagatggcaattttcagtttcaaatactgcatatgtacctcaattatggtgcaggtccgataaggtcggataaatgggatatatgcgtgtgatacgagtttatctaagaatttgtatagacatacagaaactctgccatgacctccctatgattggcgcaaataaatacaaatgctgtaattggctgttaataggcatacaataaataagtaaggtcggataactcgtcatattcaaccatatatttttgcagcgagcagagccagatccactgcgttgtatttcatcgtacacccagttttgatgagtccttataattaaaagcttcggcttggctccccacttcacctctcttttgagctgtgggccaagaaaaatggttgtgagatcgtgagctaatatatgtgatacatacctttgaaacatcagcatatgtacatgtatatgaagcttccagggtcatcgatgtttggctctgagtcaaccggtacatgtattcattactgagcggtccttcaagcccggcgagtggatccggctgagtcaggtgggcttcccgacaggactcacgacttcgagcagtgcagatgtaacaattggactttgctcgaatcatcgcgcatgcggactgcatactgcagtctcgatcgattgcacttttcttctttgtgtccttcaccatacagaatattacttccttcttgagatgtgcgccagccgcttcgagagaccaggcttcaaaccaattttgactaaacttacaagtctcccatagtttgtattaggccgaagcacaggccagctgtttccactgatttttcgtcacctgtggcacgtagatatgcttcaaatcgtgggtttggagttcgtacaaacaacgccttacaggttacagcacccttagcgccctgcgacggaagtaggagtactgtagtgagctccagatttaatactgctcatgtcgaaggaaccattgcatgtatttggtggatgacactattcattttcgactgaaatcgtatcgtatgcggctagtacatgtacgagccgaacaagcaagtttccctgataggtaacttctcaaataatcgatatcacagagtttgactgttgccccaaattaaagaaattaaaagttgcaagtgagcggtgattaatggcgcggggtccaaggacgttgagagagccttcgatctgaactaaaactccttagagctgaactaacagtcttgtcagtgaacaaacatcctgataatagaaatgaagtgctagggggtgaacataagcgcctgagtggtgaactgaaggggtgaaggagagcaaggttgcctagtccctccacgtgtcagccggcagaaaaaggaaatgcttctcttgctctagcgagtcggtgccagtgacatcgaacctgcgtgcaccaatgagcagcacgggtgatgaagcgtcttggccatccttttgagcgccatcgtcttgaggttagcacgccaagggctttgtctattatgtgctagatcgaatggggtgcctatttttattaaagaagaactaactgctagagttactccgggctcgacggcgtttagctttgccttttcgtttggatctggccgggcggatagaactatcgccagcttcggcttcctcgctaccatcacgcagcgtgtttgcagatacatacgagaggacgtcctccacgtcgagccaccctaacgcggaaaacgtttgcattttacctggatgttggtcccgcgtcaagtagatgtcagagaagcttttgtcttcgcgacctgctgcaatcacctcgtgcagtttgcgccgagctcttgactcgtcgtcgcgccacttggccaccatgtcggacacttcatcctccgatgacaacaaggcaacagttgttgcggcttcgatagctgtagccgccgctcgaattgcaccaacaacagagcttcggctgtcccctggtacctgccaacctacgtcgcttattaggcagctcagtatcgttgagaccgatcttaacgcttgcttggcttcgtccgacgccctgcatgcttgtgagaggcgcagtagctcacccgtacgaatagtagcaacgtagttcgtactcgcttccttgtaccgaccaattctgcccagcagagctccatccgccacgtcgatgtcggtgcggtctgttggcgagcagtgtaccaaccgaggcgacgtcactggaacaaatgtagggactcgatccttgcgctcgtcgtagattcctttaggggcttcagccagaggaaatgtgtggtcttcgtgggcttcgaagtacgcgctcctgtcttctggtaacaagacaccccataagctgcggtggtaccgacctgctctctctttaagccaatctgacgctttctgggggtcattcgccgcattctcagcgattgtcctcgcacccaacgtggtcccttttgcccttacgatggcccagaacgcagcatgagccctcataccacagtcttcgctatattgacgctatacagctagagatggtctcgccaagcaacagtgtagtgccaactatttatagtacgtagtacggggtcccaacgctaaaagcagcgtcctcagaccacttctacagcaagaggtatccttggcaggtcgcgcaataccagcgacttgtctgcatgatcaggcttcgagctacgaaggcctggccgagttgtatctcggccgccttaccgagttatggtaactcgaccgccttgccgagttatggtaacacggtgaacataagcagctgtgaaaagcattacttccaccgtttctctggacctacataagtattgtgcctttcggtcattttgccgagtcctgcgtaggactttggaggtcagttaatctgaggttggcggtctctaaatctgagatgcaaatctcggatgagtccgatgagcggtctcccggagtcttccgttcaatggactccggttggagtccaagccaagcaagctttgtttaaggaagcaagcaatgccggaactcgcgaaggtgaagggcgaagactggagtgtttaacgtatcgactgcatcgtgtttccctaagtttattctgcgtttgacatacgccgtattagagtcagctcgtatgaaagtcctgccacaagacttggcaggagtccttcgtaagacctcaaaccccgaatgccgtgaaaatgggcgacattcgggctttcggctgtttgtaggacctgcgcaagtgcttccatcggactagcaattcttggtcctaattccctacgacggacctgctaatctgctccgataacctagccccatcttagtaggtagctgttttacacgtccgattcgccaaaccaactgaaaagcacaatacatctgggtttgccagatggcatctatccgttcgtttgctcgataaggttgtcagttcatttctacgaaaacgttgttcacgattaaggttttctcaaggacgttacgctattgcgggctttctggcgaagcacacggtgaagcgagcgccgagtacatgtgcatgtgcatgtgcatgcgtctccatacagacagcaaccacatgaatcgggaccacgagcgggcatatacaggtacgaaagttgaagcgcgatttcgtcaaagtcgccagccacgttcaccaaatggaatggatcggctatgagatttgacgtggcgagagatcaatgaacggggtcttcagggcctacaactaatgagaccttttgtgctgttcgaacatcagggtacggtactgtacctaccaactgagctccaatcagctaccgctgcgtttctcactttccaatttgcctcgccttgagcacagctccccacccgccgaactcaagccacttttaccatgcgcgtcaatttcgctattgctgccgtcttggccctcgtcgtgaagagcgccagtgccttcactgtcggctcgcccgagggactcgccgccggcgccaccggtggagcgggaggcaagaccgtgtacccgaagtcgaccagcgagctcgtctcgtacctcgcgtccagcgagccgcttgtggtcgtgctgaacaagacgttcgacttccgaggcacggagggcaccaccacggagacgggttgccgtccggactacactcgcgagtgcatggccaagaacaacggctacaagagccaggatgtgatcatccagggcggcaacatggcgaccacgggcggctgcactggtggcaccaaggtgaagatcacatacgacaacgcagctctcaagcgcatgactgttaccggcaacaagaccatccgtggcatcggcaagagcggcgtcatcaagggcaagggtctcacgctcaacggcaacaacatcattatccagaacgtccacatcacggagctcaaccgacacctcgtctggggtggcgacgccatctacctccagggtctggaccacggcaaaaccgccatgaagaacatttggctcgaccacatcaagatctcgcgtgtcggtcgccagttcatcacgaccaacaaggccagtaccgactccatgaccatcagtaactcggacttcgacggcaacaccgactactcggcgtcgtgcgacggccaccactactggtcgttcatcttctacggcgtgaccaagttcagcatgctcaacaactacatccacggcacgtcgggccgctcgcccaagatcggtggcgacagcgctgcaaaggtcgtcgcgcacgtcgccaacaacttctggggcaacaacacgggccactcgttcgagatcggcgccaacgcctgggtgcttgcggagggcaactacttcagcaacaccaagatgccgatgtacaccggtaaggacggtgctctgtacgccgcgaccggaggtgacgagtgcaagaactacatcggccgttcgtgcgaggccaacaaggtggtggacagcggtgctttcacgtcccgtaacggtggaactgcgctgaacacgatcaagtccgtttccacgtttgtgaagtacaagccgtcgaccggctcgcagcagcagcagcagccttccaagggcaacggctcgcagcagcagtcccagacgggcgagtccgaggagcagcagcagcaacagcagtcgtctcagacgaacgactccgagcaacaacaggagcaggagcagcagcaagaccagggccaggagcagcagcagcagcagcagcaggaccagggctcgaggaagctggctgtccagacgagcaacctggagaaggagtggcagcagaccaccggcaacttcggcgtcggtaagctggactaagcgaaccttatccttctgatagaggagctatagagttgatgcgtggtgcgtgatatatcgtaaaagtcaatactaatctagatgtcattgagaaacttcgagtgttgtttattgtattaaaaaatcacactcccatactcatttttttgtattgtgagctatcgaaaaacatatcggttgtatggcacttcgaagtacggcggcaaaatatctaaacattgaagcgagccaggacgctgcttaatttgattgcaaggttgctcggtcaccctcagcgactccattgttacactcactgcgtcaatatcgcggtcctttacgatgccttcctgtctggtggtgaaccattccccagggtctttaggtgacctgacggttcttttgatttatagactttcgattagctgtccattgagtcagcttgagattttgatcaaaatagagggctttgctaaagttttttttttcgaaagtcgaagggagcagtggcagtgtcgatctggcgaccttccttccttccttccttgcgtggtgcgctctacgatcagtacatatacagtactctaccttatcttcagatgtgtgccagccgcaattcgagatccgacttcaacaaaagcgcgactagcttatactaatctctcnnnnnnnnnnnnnnnnnnnnnnnnnnnnnnnnnnnnnnnnnnnnnnnnnnnnnnnnnnnnnnnnnnnnnnnnnnnnnnnnnnnnnnnnnnnnnnnnnnnncgccatctacctccagggtctggaccacggcaaaaccgccatgaagaacatttggctcgaccacatcaagatctcgcgtgtcggtcgccagttcatcacgaccaacaaggccagtaccgactccatgaccatcagtaactcggacttcgacggcaacaccgactactcggcgtcgtgcgacggccaccactactggtcgttcatcttctacggcgtgaccaagttcagcatgctcaacaactacatccacggcacgtcgggccgctcgcccaagatcggtggcgacagcgctgcaaaggtcgtcgcgcacgtcgccaacaacttctggggcaacaacacgggccactcgttcgagatcggcgccaacgcctgggtgcttgcggagggcaactacttcagcaacaccaagatgccgatgtacaccggtaaggacggtgctctgtacgccgcgaccggaggtgacgagtgcaagaactacatcggccgttcgtgcgaggccaacaaggtggtggacagcggtgctttcacgtcccgtaacggtggaactgcgctgaacacgatcaagtccgtttccacgtttgtgaagtacaagccgtcgaccggctcgcagcagcagcagcagccttccaagggcaacggctcgcagcagcagtcccagacgggcgagtccgaggagcagcagcagcaacagcagtcgtctcagacgaacgactccgagcaacaacaggagcaggagcagcagcaagaccagggccaggagcagcagcagcagcagcaggaccagggctcgaggaagctggctgtccagacgagcaacctggagaaggagtggcagcagaccaccggcaacttcggcgtcggtaagctggactaagcgaaccttatccttctgatagaggagctatagagttgatgcgtggtgcgtgatatatcgtaaaagtcaatactaatctagatgtcattgagaaacttcgagtgttgtttattgtattaaaaaatcacactcccatactcatttttttgtattgtgagctatcgaaaaacatatcggttgtatggcacttcgaagtacggcggcaaaatatctaaagcattgaagcgagccaggacgctgcttaatttgattgcaaggttgctcggtcaccctcagcgactccattgttacactcactgcgtcaatatcgcggtcctttacgacgccttcctgtctggtggtgaaccattccccagggtctttaggtgacctgacggttcttttgatttgtagactttcgattagctgtccattgagtcagcttgagatttgatcaaaatagagggctttgctaaagtttttttttttcgaaagtcgaagggagcagtggcagtgtcgatctggcgaccttccttccttccttccttgcgtggtgcgctctacgatcagtacatatacagtactctaccttatcttcagatgtgtgccagccgcaattcgagatccgacttcaacaaaagcgcgactagcttattactaattctctcatatttaatatcaactgggcgatccgatcgttcgctggtgacagctttttcagctgctttcgctgatcgctttctgaagcacgaatcaaatccggacgctttggattgtgaaaagtcacgcgcggcatggattgccgtgcatgacttacgtgaactcgagccatgtggtgatgcaaaggacggtgcatcgcccgcacatcgaatcgtgaaagactgtgtgcagcactgcgaacgggaccaccaccaccacgctcaactttagaccaccgttgcttcgaccatctaaccactgcaacgttgcttcgaccatcaaggcgcacgcgaccgttggtacgcgcacatgtagcactcgcagcatgtttacctcgatttttacctcagtattgagcatccgtggttgatgaaagctcactccgagggtacagtggacgtaccgtattgagaagcgtcggttggataccatcgcagagaatgcagcgtgcgctgaaatacgcaccatgggcaccacacgaagtgacaacgtgcggtcgttcgacggcacgagaattaatctgcaggcccaagtccaacgcaaggtgtatctatttgcaatactagtaagttaccccccccacacacacacacacagtacgttggggtccttcgtcggtctctgatgcagcgcgtgactatccaactgcttctcatgacgtacagtacatgttctcgatgaacatccgaatagccgtcaatgttcacgtcggcaagcgaagacggacacagacgtaaccaaccagccgcgagccttgtcccaagcatggcagtacggtaaggtaaacagtaagcaacggagcggatataaccgatcgagtttccacctctgcgtacagtatgcactgctactctaagcaaacgcattgactgtacatgcgcaagcagacgtgcctttgaaacggcaaacaatcttgtcgtcgacgaaggcgtcaacaattaattgccttctgtgtcagcagacggtggagcggtccttacagtattaaaactcacctcagcgtccgcacttgtcgtgactgctcaacaaaatcggtatccacgcttgcgttacgacagccgccagtccacaaggaccccttcatccggtaggacggaaaccaagctttggggatttaacatgcggatcgacagtgcaaagcccccaggatgttgaacagtcgttcctcgatacatcacgaaaaccagactgacaaattaatccggactggcaaccaacgaacgccaaaccaaagcccccaagctcattcattccccaattcgcctcgcctcgagcagtcagccaagtccaaccccggtcttcttcatcatgggacatatccagcttgctctcgctgccgcgttggccttcgtcgccaaggacgccagcgccttcaacatcggctcccctgcgggcatggccgctggcactaccggcggagagggcggcgaagtcgtgtacccgacctcgaccagcgagctgatccagtacctgaacgacactgagcccctggtgatcgtcctcaaccagacgttcgacttccgcggcacggagggctcgactaccgagatgggctgccgcccagagaatatgcgcaagtgtctggccaagaacaacggcttcaagggccaggacgtgatccttggccccggcggcatgaacaacacgggcggctgcaccaacggcactgagatcgaggtgacgtacgacaacgccgcccagaagcgcatgaacgtcaagggcaacaagactgtgcgcggcgtgggcaagaagggcgtgatcatgggcaagggcatgacactcaacggcgacaacatcatcatccagaacgtgcacgtcacggagctcaacccgcacgtgatctggggcggcgacgcgttcttcatccagggcaccaacaagggcaacaccacggccaagaacatttggctcgaccacgtcaaggtctcgcgcgtcggccgtcaaatggtcgtgaccaacaaggccggcgtggactcgctcaccatcagtaactcggacttcgacggcaacaccgagtactcgtcctcgtgcgacggccaccactactggaccttcctcttctacggcaagaacacgggtatcagcatgctcaacaactacatccacgccacctcgggccgctcgcccaaggtcggaggcaacaagaacgagaacatcgtcgtgcacatcgccagcaactactggggcgacaactcgggccactcgttcgagatcggcgccaacgcctacgtgctcgctgagggtaactacttcaacaacaccaagcagcccctggaccccaagggctcggacggaaacctatacgccaccgactcgaacgacgtgtgcagcaactacctgactcgctcgtgcaagtccaacactctggtgagcagcggcaacttcacgtcgcgtaacggcccggctgtcctcgaggcggtgaaggccaactcggccattacgggatactcggcgagctcggctcagactgagcagcagtcgtcccagaccaacgactccgagcagcaggagcagtacacccccggcacggccaagccatcgaccgagacgacgcagtccttcgctcaggcgagcgacctggctgatgtgtgggcccagacgaccgacaactttggcgttggcaagctcgactaagtctatattcgtgtagtactgtgtaaccatcgaggtatgatggcatagaatacaaaagttttatgttgagggtcacagagtagcccattcattcattgagttccgcagacgagttccgataaacatcgtgttgtgcattttgcgcttaggtaaggacaagcggcatgtgtggatatgactaagtttgcatatacagtatcctatcgataggatactgtataggctatcgcccgtgtacggcattcgttggcctgcttgatttccacctgtcattcctacaccatcgacaatttgctttgacgaagagatccgaaagaaaagtaaattcctttacttggataccaaatgatcaagatgtccagggctattgaaagcagctcagttcttttagcagttcatacagaacagttcttcttcattgccgaattcgccatctagcggacacttgaagagccagccacctcctcccagcgcaaatgaagatttcactcgcagggctcccgttgtttctaaccgcaggagttgtagccggctactcgaaccccgagacctgcacaggtacctgcaccaacacacacgacccctccatcattcgccgctctgacggcacgtacttccgcttctcgacgggcaacaagattgccgtacactcggccccggacattgtcggcccatggacttacttgggagccgctgtgtctgacggctccatcatcgacttggacggtaacgacgatctctgggtaaggcactcgaggcatcgaaaccatagagtttgagagatttacctccattcttgtgttgtaggccccagacgttcatctcgttggcgacgagtactacctctactactcagtgagcacgtttggctcgcagaactcggcgatcggcctgacgcgctcatctaccatggacattggtacctggacggactacggtagcgccggggtgagcagtacgtcagcgaaggcgtacaatgccattgacccgaacctcatcgacgtcgacggaacgtactacctcaacttcggcagctactggcaagacatctaccaggtcgaaatgaaggccacacccaccaagtccacaggatcggcctctcagatcgccttcacgtccgactacgaggttttggaggggtcctacatgttcaagtatggcgactactactacctcttcacgtcgaagggtcaatgctgcagctacgacacgtccaagccagcagcggggaaggagtaccgcatcctcgtgtgccgctcccccaaggccacaggcggcttcgtggacaaggacggcgtggactgcacgaacggtggcggcaccgtcgtgctcgagtcgcacgacgaggtttacggccccggtggccagggcgtctacgacgacccgacctatagtccagttctgtactaccactacggtgagcatttttgtaggatcttttggtctagtcgattgtgtatcatgctgacttgtcgtctgacgttcgttctgttccagtgaacaccacgattggctacgcggacggcgacaagcgcttcgggtggaactacctcgatttctctagtggatggccgactgtgtagccacgacggtcctggtctgtgtggctgttgctcatgtgtcgttcgtttcaaatttatgctctgaaagaattcgtttggaatgtgttatatattgttatattatatattgttctaattctatgcgctaaaacattactttagaaatatatgtgtttgaaagatattctatatttagatttaatcaaatattacatcgtttcaaatatatttttgaattatcgctctaacgttttgtatatgttctaaatatggacttaattcaaattagagcacctgatttcagagccttggtcgctccagtgtgaaagcaatgacgatggttcaatgctggccacgtgcgcgcctgtccgatgcctgccgtgtatagttctcgccttcgctgcagcggctggcaaggcgttaagagctaagtcactttactcaccatagctgactctaatagttacggctttgttcgtatccaaagatacgaatacgatggcgtcgactgcaccacccttcgctatgctggcccgacatcgccagtggtgattctccactccccatgtatgagttcatccttacatgttagcacaattctacgctacgtactcataagttagtgttttactcaaagttcaggattggtaagggttgagtatttttgtgccgctgagcgacttatccactccaaacgcactccggatttatttgtgggtaagaccagcgctcaagttttaagcagattcgtacttctacggcaaaatttattcggattaggtgttgagcagaacttctttgtaagttgggtcacctgtacgatagggggggtgctggtggcagtttatctgtacgaggcgaactcgcgtttcagcgcgagagttggtagctagctgcttagagcgagcctatacaaccggccacccgctggagaagtcgatcttgttccaaccgaagcgcttgtcaccgtccgcatatccaatagtcgtgttgactggaattcacaaagaacaatcgtgagtgcatgaccaaaatagcgccgaggtatcacatgaagaagactcaccgtagtggtagtacagaactggaccatgagccgggtcgtcgtagacgccctggccgccggggccaaagacgtcgtcgtgcgattcgagcacaacggtgcctccgtccttggtgcagtccacgccgtccttgtccacgaagccgcccgtggccttggacgagcgacacgcgagaatgcggtactcctttcctttagccggcatggtcttgtcgtaggtgcagcacttgcccttggacatgaagaggtagtagaactcgccgtgcttgaagatgtaagggccttcgagcacctcgaagttggacgtgaagccgatctgagcggggtcagagctagatagaatcggcgggtcgcgcatgtgagactggtggatgccttgccagtagctgccgaaggtcaggtagtagcctccgtctgcctcaaccaggttcgggtcgatagcgttgtagggcttgctcgcgtcgctcgtgataccggtagatccgctgtcttcccacggaccgtccagcgaactcgagcgggctacaccgatcgcggaatcctgcgtgccgaagctgctcactgagtagtagaggtagtagaagttgccggccttgtgtacatcaggagcctgcaaccaggacgtagttagggttgaaaacactgtggagtactacagtagataccggaacttacccagagatcgtatcggcccttcaattcgatgctggagccggccggaagcgcagggcctttaaactcccacggccccgagatgtccggcgcggtgtgcaccgagatgttgccgcccgtggagaagcggtagtacgttccgtcggcgctctggatgatggacgggtcgtgcgcgttcgtgcagcctgtggagcatgcgccgggggcggcgtatccgttgacgccagttgctgccgccaggagcgggaatgctgcgagccacgagagagtcttcaccattggggcgactgaacttggggtgtctgaagcgggcgacgagaaagcgaaagtgatctgccaacggagtgtgcggcgcgctcgattttacggagctgcccgcgagcacgagagtcattaaagcaacattgaaaatcagcctcaatgtgtgggatcaataacattgatgcgtgatcgctaacattgacgcaatgtaaattttccagacgtgaaatttcatgtttggagcaactggctcacaacagctctcatttcagaatctaccgggtaggaagcaagcggccgcgcgctcgctacgcctccgcgtcgtgcgaccgtctgcagcggtcacccgctcaaccttattctaatgtgtgcatgtcctactgcggtgcttatatgcatgtgtgtactacgtatgcgggagcaaacgccttcccagtgcgttgcgttgcgtcaggtgcgatgcgtgttgcatgcaatcgaatgcgctaccttctaagcaggcgtaagcgcttttaatgcgcctctagccaacagcgcagttaggttaaagggggagggcgagcgaacgcgaacgcgagcgcgagcgcgttcaccgatcgtcaacacccgccgatcaggcgggggcgggtctgcgcgagcgagcgaaggcgagcgctgcaacccgatattttttttcctagacaccgcgcctggccgagccgaggaccgcacagcggcgccccccgagcgaagcgagagaggccccccccccccccgaagtgccgtcgctaagtccgcaggcgaaagccaacgcgagagtgtcctgccaactaggaatagacaacacgtggcgcccaggtagagctgcgcgtagatcccgtagagcccattctcctgctgcatgtgtcggcggcgccgactcggcgcatacaccatgacgcgcttgccgcgttagcggcggaagctgttggcgcacgccccgagtgatacagcgtgtttcgctgtcgtgatgtctgtcaagctgtcgagctgtcgtggcgacgcgtgtccactattgtcacattggtaaacaaatattctgctacgagagataccgtaacattgtgcaatgttaggcagaggcaccattgttgcgctcaatgctacgcaacgccaacatttcaatgttgctttaatcagtgcccgcgagcactgtacagtcgccgcagactccgagactcagtctgcgcctccaactgagtctcggcggcggattacgattccccatccgaaaagtctaaaggaattgaagtggataggactggctaaaatttcggtggggtcaaagggaacatcgcgtcgtcagaatgcggttagcaccggacttcctctcgttcatcgataacatcgcttgccgaactacagcaaaccatgtcgaaattcactgcttcggttgggtggaaatgaccttcagcatagaataacgcacgaatctaggttatacttttcgagatcgggtcgacgatcctggcgaggttccgactgtacctacggtaggtcctcttccgtatattttactacaccgtaaacgagcgcaaacagcgttactgcgggcgcttgctctccctggctcgaatgtacaggcaacgcgtgcgactcaaaagaagaaaaaaatgaaaatattaagacgaaaagctctgctgctcctcgtaagcttctcgatctcatcgaacaacaccaccgctatggccatcggaccgtccattaatcatgaagggaagtgcagagttcaggccttctgggggtgtaagttagcgtgcctttccataatgaacctgaattgattgagttggcaatacagtaaacatttcactgcatatgtacaagtacatgtacagtatgcaattaaggaggaatgacgccgttgctgcccagggagtgttaacaccaagtccacgagccccgtcaactcacgggctgatacggggccaaccggtcgagaagtccagggtgttccagccgaatcgtttgtccccatctgcgtacccgatgcgtgtgtcaactatggagaacagatcaacaacatggttaaacaaggagtatgagctgttcgtgtgagtgtagtgcacctaccgtagtggtaatacagcacgggcccataggtcgggtcgtcgtagacgccctgtccgccgggggcgtagaagtatccctccgacgctcgcaccacagtcccaccgccagccctgcaatccttgccgctctggtccacgaagccgccggtgggggacgaagaccgacatacgaggatgcggtactccttgcccgcagccgggcgagacttgtcgaggttgcagcattgtcccttggacatgaaaaggtagtagtagctgccgtagtggaacacgaacgcagcttccaggacctgatagtcacccgtgaatgcaatctggtagggggtactgctcggcattactggagggtctcgcatgggggcttggtagagtccctgccagtagctcccaaagctcaggtagtacgcgccgttgacttcgatgaggttcgggtcgatggcgttgtaggtttgctggagctgctgacgatgccagtggtcccgcgatccacccaagtgccgacgtccattgtgcgggagcgcgcgagcccaatggcagagttctgcgtgccaaacgtgcttacagagtagtaaaggtagtaccagctgccgactttgcggacgtcgggggcctgccaatttacagtaaacatatctcttcatgcagcactaatacatttcatacgtacccagaggtcatctttcccgttgagattgatgatcgagccggcaggaacagcggcccccttgtacgtccagggccccgttagagcaggcgcagtgtggatggcgatcctgccgccggtggagaagcggaagtacgttccatcgtcgcggcggatgatggacgggtcgtgggcgttcgtgcaggcgtcagtgcacagcttcggttgagcgtaggcgtcgacgacagtggtggtggtcacgaccaaagacagcagggcgagaagcgagagtctttccgccatgttggacttgtgccggcgaggagaaaacggaaatgaggctctatgctatcagcacagaacctcatttcggccgactcggcggtatccgcgtcaagggcgtgggctgatccaacgcattgagacagttgaatcttgaactacgcacgcgaaatgcaacttgtattagtctgctctatgacaagacatccaaagtttcatcagggctaaacaaacagtacatgtacagaactctgcctgaataccgaacgcctgatatatataagggctccaggttgataaagtgatctcagcgttaccagagaaaggctgtactgaattagtttatcttagacgggatttgacgcttgcttagttaatcaaacccgagtaaaacagtgctgagttgtttcagcgctgaccttcgaccaagcgtgttcgcaccacatcagtgcggttagtagctctactttgtactactcctagagggcttagcgggtagtgcgcaaatgtgaaagtggaatcgtaaatacagagaagatcgcacagacaatcaaaagggcgccaattttcaaactgcacagcttagtacttttagccaaacaaaggtatcctggatttttacatcagtacctttgcccatctccgttcgtcctgttgttggaccttgaagtattatttatatgaggttatgtattgtatacccgttcggtattgaggcagatttctgtactcggtgcaggtacaggtgcactacatttcaaggacgcacatgaatgtgtacaagttgcagttgtaccactacagtgactgctttaacactaaacgtcttcaatctagttgagcacaccaattccaaagtttttggtcgtcttgaccagcttcttcgccgctcgtggcgcgaacttcgagacggccgagttgcccttaatcttggacagagctgtggcgccgttgcacgacgtgagcgagccgctcttgtccagcacattcgccacacacgaccgacctaagtagttcttgcattcggtggaggccgtggctgcgtagatggctccctcgttgccagccgacagcggcgccaccgtatcctggtagtagtttccttcggcaaggacgtatccgttctcgccgagctcgaacgagtgcccggagttgtccgcccagtagttgttgaccacgtgtgcaatagcgttggcgtcgctggcaccgccgatcttgggggagcggcccgaggtcgagtgcacgtagttgttgaccatgcttaccttcgtgttcttgccgtacaggaggaacgtccagtagtggcggccgtcgcacgaggcggagtagtctgtgcggccgtcgaagtccgagttgctgatggtcaaggaagcgacctcggcgttgttggcgacgaggaactggcggccgatgcgagagatcttgatgtggtccagccagatcttgttcatggccgtcgagccgccgttgcggccttgcatgtagatggcgtcgccgccccacaccaagtgacgtctgcgtcaagacgatcactcggggcacggcgtccttgaggtacgcggcgagttggctgttcgtcttagggtagacgggggtcgcattgcctccgcccgtggtgatggaggagctgcatcttcgaaggcatgtaagcgatggaccgaagagcttgtgccgcgcgatgcgaattggagaatgaccaccacccgtggcgggagcgagcggggagcgtgggggggaaccgtcttggtgtttgaaagctgacccgttcgaacagcgagtgcgtatctggtcctgcccaagcgcgcccgttatttacccttgcttgcacggctgccgaggcaatgtaaggtattgcccggtcaacagtgctcgttgaagggatagttcaacgagggccggtacaggtaatgttatccaccgaaacacgttggtgacgaaccaaatcccacggacagcaaatcttggcaacctcagcaaacgttttgacctgcgtataccaacgttttgtcttcaaggacaccccgtttgcattgacactccttgaagcaacgcagcttcgtgaaacgctggcggcggtacccctcgcaaggtggcgggggccacacatctttcctggctttggacactacaacagtgttgaattctgcggtacatgtagttctacccacgccttgcacgacgtacatgcagtgccactacggcgtgtacacacaacaagcagataagcctggcgactcgcttgatcccttgaagggattcccctttcgcgagcaaatctgcgccacggtgccctggtcggaccccgacgcgcacatagctccaccccgtttaacttgtctttggggggatccatgtgcgtggatacctcgcacgccgctcctcgattgttatctctgacagcacctcgccccacgccgcgaagagtcttccctgaagacgacgacagccgaacgatatcgccagcgcgctacggagtccggcatcatttttcgcgttcaaaaatcggtcacgtcgtggccgccgtgaacgtcgtgtccgtcctcttcactttatcgccgcgtcgtgtacgcgactagcgttttgctagtcgcatagagtttgacgcgaagatgcggccagatgtcatctggccgatggatcggcagagctcaacagatgcaccagggacatgtgcaaccaagtcaagcaagccgtcggctgacacccgtgccaggacggtcacttcgaatagccccaatgcagcagacacctacgtactaatatcatctcctatcggcagcaacagccatccgctgacggcgggacacagagacgtcttgatccgccgatgtagcgtgctcgagggcctccgtggcccccgattcaagccgagcggtcattcattcatcaattcgcttcgtccggaacaagccccccctccattcccgacaatgaagttcctgcgtcccgttctcgttgccgttgtggctctcgtcttccagacctctgaagccttcaccgtcggttcggccactggtctggctgctggaactacgggtggaggcagcgccacccccgtgtacccgaccacgacggcgcagctcgttgcgtatctgaaagactcggtgccccgtgtcatcgtgctgaacaagaccttcgacttccgcggcaccgaaggcaccacgaccgaagccggttgccgtccggactacacccgcgcgtgcatcgccaagaacaacggctacaagagccaggatgtgatcctgcagagcggcggcatgtccaacacgggcggatgctcggacggcaccagcgttacggtcacctacgacaacgccgccattacccccatgacggtgacgagcaacaagacgctgggtggcatcggcacgaccggcgtgatcatgggcaaggggctttggctcaacggcgacaacatcatcatccagaacgtccacatcacggagctcaaccgccacttggtctggggcggcgacgccatctacatccagggcagcaacggcggctcgacggccatgagcaagatctggctggaccacatcaagggggcgccagttcctcacgaccaacgccgccagcgtgtccaccatgaccatcagcaactcggacttcgacggccgcaccgactactcggccacgtgcgacggccgccactactggtccttcatcttctacggcgccaacacgcgcttcagcatgctcaacaactacatccactcgacgtcgggccgctcgcccaagctcggaggggacagcagcgccaacgtcgtggctcacatcgccaacaactactgggccgacaactcgggccactcatttgaggtcggcgtcaacgcgtggatcctcgccgagggcaactacttcgaggacacgacggcgccgctgctctccggctcggatggctacatgtacgccgccaccgccaccaccgagtgcagcagctacctcggccgctcttgcgccgccaacgttgtggacaacagcggccccttcggctctcgcagcggatccacggccctgtccaaggtcaagtcgtactcggccatctccggttacagcccgcgcagtgccaagcagtggagcaagaccacgagcaactttggcatcaactaggtgttcgaccctctatatcatctagagacggcagtcgtacagtcccttatactttgatgttttctgcgtcaactaaaagtcaataaatgaccaaattcgtatcaaaaactttagataactgctcatcacccaagactcatacagtgtctggagtacatgtacattaatcgaccaggtcccaaacgccgctcccaatgaggagagccaatcataagtgagattccaaatgacttcaacaaagtatggactggtttatcggctccaaagccaagaaaaaaccttaaggttttatttttggccggctgcgcagccttctccgccttcacactttccgccccgcatctccaacacgacagcgcgctccgagcgtgccgcacgcctcccccgccgaccaccccagacccgagtgcccccaggcgcgccccacgcgccccacgcaaggacccgtcgaaaggagctacaaaacccggcagggcgggtgttatgctgccggtttggtagctgtcggccaagcacgaggtcgtgcgcgctcgctgacggtatgtgagcgtttttctattgtgtatgactttgtatcgggactgacgggaatccatgcgctatgcttaagttgtgggatggcgatgacgggtgcatttgcgccttgaattcgattatccatgttgtatgaataggaatgtattaagcgttaatacaagctgcgtgatcctacgactccaagtctttttgcttccattggtgacttgctggtgtgcagcggtcgacaatgccactgttcgctttgcgggtgataaatgctgagcagagcgcgtcgtacgcagagcagtggtcaacgcgcagctttctccagcgcttccgtagcgaccccgcggttttggataggcctttaccgtcgatactcccaagcgcagcgttgaccttcttgtccaagtcttctgctagcgtccagacacgctgcttccacagccgatacgcgacgccgtcccggtccagtggcgccgttggtacgtctacctctcgccctgctgctatgatcatgatgttgacgcctgccttgaggtcagcgcgaacaaactgttgtttcttttgggttgccgccgtgtgccacagctccagtgtgtaccagttgtagaagcagctagcaagagagtgcacttcaacgacggtgtcagtgctcgcctgcggggcctggccagcacagcgacaaggagcaggaccgtcagcgctggtggacttgctcttgtggaccgcgacgagcttctgaagtgtgcgctgcattgctgcgatggacgatagcatctgggtgacggctgcggcaagtatggtggtgtttccattgctgcgttcacccagctgtccgaagttctccgtttgccaagccgtgcgaagctgccgaccccaaccaatgcacgtgtccagcgagagccgagctcccagcgctacgttggttgcgtccagagcttcgtgaagcggtacaggtaatgcaatgtgaagcctgtggcagcctgctcctgctggactgccgtcgcgacgtcgtcaagatggatgagcagggacgcgagcgccgcatccaggactaaggcgtcaacgttgagcgtggtgtccgtgaagccgctgacgttcttgaagagctggccgcgcagggttagcagctgggcgtactcgagcgcaggaagaagctcgttcaaggtggcaatcgtgggcgtgacgcatggcaggtgcgggtctcggtatccagcgaggactttgccgacactctggtcctcgcgtgtcgtggtacccacgtacgcgaacgccttcgtgagcgagtctagcagccaagctccccgggtcgagatccactggatcgcaagctgcggtgaggcgtttgcatacgctgcggagccgcggcgcaaggagtggctgctcagccctgcggtgagcgtcgggggcagcggggcagaggcctgggcttggcgctcgcagaccatggtgatgacgtcgttaatatacttggacacgttgggccttcctctcacgcgctttgttggtggctcgttccttggttcagctttctcttcaaggttctcccagtagagtatagcttcgtcttggctgtaggtcttctcccctggcaaatccgatgccgccgcgtgcggcactagcgggaacacatagctggaaggctccgacgctccgacgaacagcattccgaggccgtgcagcatacactgctcccagtgagtcgcggccttgtaaattgagatgccttgaaccaccgaagtcttgattcgagctagatgcagaaagagctcccccgatgccgccatagatagctggctcttcctagcaaaacaggtatcgatcgctcgaccaaacgtgtgccacattaacgttagtacagcagcgtcatgtaagctcttataacctgagccaacccccttaatcgcagtttcctgcaccagaacacgcaagtcgccgagcgtgcagcctggagcttcaccagtctgcacgccagctagcaaatttcgctcctcaatagttgaacccattttgtcgcgtattttcgcaattcgcttgctgtctgacaagtacagagggtaccgctctcggagcaggttcacaacttgggacatatagcccacagcagtagccttagcaagacggcctcctcgagcacttggcttagtttgcaagaaaatggagaaggcggttagcaaagagtaaaagttttgacttggtagagcatcaggaatagacagcgacttcgcaatactagcaattgactcctcattcatgttagcaagagctaagaattcgctgaagcacttcatcgccgctgcctcctgccctgctgtcccttgcgggatgtcaagccctctcggcgctcgctgcatcttttcaaatgggagaggagagaaagcagacgagtcacagccaccaacgatacaatcatgatttgtattgggaatttgcggtcaaatatgagtaatgcaacaattacactaaacttttgtattggatattattctagcaagactgtaaattcccaaaataattgggaaaatgttgggatacacacgaatcgatcgtgattggctaaattcattgaagaacttgtcctgattggatagatgcaatgacagagaagcgcaaggaatgccaagttgggagaaagcttccttatcctacagtaatctgcccgagtaaggaacgcctgatatatataaagacgcagaatatataaattgatgttaagttgagtatacttttccaatgtactggtttagttatttcaaaatgaactgaagagcagctttacctacgagtccggaatgattccaacagtggcgtatggtcgaagcactaacctttgaccaggcatcctcgcaccacaacagcgctgtcaactggtcgacctcgtagggattatctagcccttcaccaagccggtctagagcctgcatcattttaagtgaggcggagacgcttggacggtgtggacttcatgggtggagtggggaaggaggtgggcttgtggggcgaggtgcaaaagaaaaagtgcgagtctaccactacggtacatgtagtttgaagtctagtaagatcgctaaatgcgcgccatttttcaaacgagggtggagagctgatgattggcactggatttttcacctcagtaccttgcacatccccctatcgccacatcgactggaaaataatattaaatatgtgaggctattagttatacacccgttccttatcgggcagaattctgtacatcttcgtttttccgttctgtgcaagcagcaggtcaacgaaagcgttgcacgcacagaaaaatgctgcaaagcttagcaagacgttgaagcgcagtcaccgcggctgctgggtcaggcgaactccaagtgcattctcgctcgtgcgattgtcaggctcctctcgctgctcgacgccaaaattgctccatgcccgcatatgccaagaagaggtgatcgccatccgcttggtgacagctttcgtcaaggaggcacagtgcaggcagttcctctacactaccgacgccactcgccctccacttcctatttggtgtccgcgttaaaagatgaagctgctctccgtcctcatcgctctattgccgttggtattcgccggactcgtcaacggctacgtgagccccaagctctgcaccggcacgtgcaccaacgcacacgacccgtccatcatccgtcgcgacgacggtacctacttccggttctccacgggcaacaagatcgccatccactcggccccagcgctgacgggtccgtggacgtacctcggggctgcagttcctggtggctcgacgatcaacctcgcgggtaaagatgacctatgggtaaggaaggatcatattgtgtcttcctttactccacaatgccatcactaactcgttggtcgttgtcattattgcaggccccggacgttcacaaggttggtgactactactacctctactactccgtgagctccttcgggacgcagaactccgctatcgctctgacgcggtcgaagaccatggaggccggctcttggacggacctgggcagtattggtgtcacgagcgactcgtctaagaagtacaacgccatcgacccgaacctgttatacagtaatctgcccgagtaaggaacgcctgatatatataaagacgcagaatatataaattgatgttaagttgagtatacttttccaatgtactggtttagttatttcaaaatgaactgaagagcagctttacctacgagtccggaatgattccaacagtggcgtatggtcgaagcactaacctttgaccaggcatcctcgcaccacaacagcgctgtcaactggtcgacctcgtagggattatctagcccttcaccaagccggtctagagcctgcatcattttaagtgaggcggagacgcttggacggtgtggacttcatgggtggagtggggaaggaggtgggcttgtggggcgaggtgcaaaagaaaaagtgcgagtctaccactacggtacatgtagtttgaagtctagtaagatcgctaaatgcgcgccatttttcaaacgagggtggagagctgatgattggcactggatttttcacctcagtaccttgcacatccccctatcgccacatcgactggaaaataatattaaatatgtgaggctattagttatacacccgttccttatcgggcagaattctgtacatcttcgtttttccgttctgtgcaagcagcaggtcaacgaaagcgttgcacgcacagaaaaatgctgcaaagcttagcaagacgttgaagcgcagtcaccgcggctgctgggtcaggcgaactccaagtgcatcctcgctcgtgcgattgtcaggctcctctcgctgctcgacgccaaaattgctccatgcccgcatatgccaagaagaggtgatcgccatccgcttggtgacagctttcgtcaaggaggcacagtgcaggcagttcctctacactaccgacgccactcgccctccacttcctatttggtgtccgcgttaaaagatgaagctgctctccgtcctcatcgctctattgccgttggtattcgccggactcgtcaacggctacgtgagccccaagctctgcaccggcacgtgcaccaacgcacacgacccgtccatcatccgtcgcgacgacggtacctacttccggttctccacgggcaacaagatcgccatccactcggccccagcgctgacgggtccgtggacgtacctcggggctgcagttcctggtggctcgacgatcaacctcgcgggtaaagatgacctatgggtaaggaaggatcatattgtgtcttcctttactccacaatgccatcactaactcgttggtcgttgtcattattgcaggccccggacgttcacaaggttggtgactactactacctctactactccgtgagctccttcgggacgcagaactccgctatcgctctgacgcggtcgaagaccatggaggccggctcttggacggacctgggcagtattggtgtcacgagcgactcgtctaagaagtacaacgccatcgacccgaacctgttatacagtaatctgcccgagtaaggaacgcctgatatatataaagacgcagaatatataaattgatgttaagttgagtatacttttccaatgtactggtttagttatttcaaaatgaactgaagagcagctttacctacgagtccggaatgattccaacagtggcgtatggtcgaagcactaacctttgaccaggcatcctcgcaccacaacagcgctgtcaactggtcgacctcgtagggattatctagcccttcaccaagccggtctagagcctgcatcattttaagtgaggcggagacgcttggacggtgtggacttcatgggtggagtggggaaggaggtgggcttgtggggcgaggtgcaaaagaaaaagtgcgagtctaccactacggtacatgtagtttgaagtctagtaagatcgctaaatgcgcgccatttttcaaacgagggtggagagctgatgattggcactggatttttcacctcagtaccttgcacatccccctatcgccacatcgactggaaaataatattaaatatgtgaggctattagttatacacccgttccttatcgggcagaattctgtacatcttcgtttttccgttctgtgcaagcagcaggtcaacgaaagcgttgcacgcacagaaaaatgctgcaaagcttagcaagacgttgaagcgcagtcaccgcggctgctgggtcaggcgaactccaagtgcatcctcgctcgtgcgattgtcaggctcctctcgctgctcgacgccaaaattgctccatgcccgcatatgccaagaagaggtgatcgccatccgcttggtgacagctttcgtcaaggaggcacagtgcaggcagttcctctacactaccgacgccactcgccctccacttcctatttggtgtccgcgttaaaagatgaagctgctctccgtcctcatcgctctattgccgttggtattcgccggactcgtcaacggctacgcgagccccaagctctgcaccggcacgtgcaccaacgcacacgacccgtccatcatccgtcgcgacgacggtacctacttccggttctccacgggcaacaagatcgccatccactcggccccagcgctgacgggtccgtggacgtacctcggggctgcagttcctggtggctcgacgatcaacctcgcgggtaaagatgacctatgggtaaggaaggatcatattgtgtcttcctttactccacaatgccatcactaactcgttggccgttgtcattattgcaggccccggacgttcacaaggttggtgactactactacctctactactccgtgagctccttcgggacgcagaactccgctatcgctctgacgcggtcgaagaccatggaggccggctcttggacggacctgggcagtattggtgtcacgagcgactcgtctaagaagtacaacgccatcgacccgaacctgttatacagtaatctgcccgagtaaggaacgcctgatatatataaagacgcagaatatataaattgatgttaagttgagtatacttttccaatgtactggtttagttatttcaaaatgaactgaagagcagctttacctacgagtccggaatgattccaacagtggcgtatggtcgaagcactaacctttgaccaggcatcctcgcaccacaacagcgctgtcaactggtcgacctcgtagggattatctagcccttcaccaagccggtctagagcctgcatcattttaagtgaggcggagacgcttggacggtgtggacttcatgggtggagtggggaaggaggtgggcttgtggggcgaggtgcaaaagaaaaagtgcgagtctaccactacggtacatgtagtttgaagtctagtaagatcgctaaatgcgcgccatttttcaaacgagggtggagagctgatgattggcactggatttttcacctcagtaccttgcacatccccctatcgccacatcgactggaaaataatattaaatatgtgaggctattagttatacacccgttccttatcgggcagaattctgtacatcttcgttttaccgttctgtgcaagcagcaggtcaacgaaagcgttgcacgcacagaaaaatgctgcaaagcttagcaagacgttgaagcgcagtcaccgcggctgctgggtcaggcgaactccaagtgcatcctcgctcgtgcgattgtcaggctcctctcgctgctcgacgccaaaattgctccatgcccgcatatgccaagaagaggtgatcgccatccgcttggtgacagctttcgtcaaggaggcacagtgcaggcagttcctctacactaccgacgccactcgccctccacttcctatttggtgtccgcgttaaaagatgaagctgctctccgtcctcatcgctctattgccgttggtattcgccggactcgtcaacggctacgcgagccccaagctctgcaccggcacgtgcaccaacgcacacgacccgtccatcatccgtcgcgacgacggtacctacttccggttctccacgggcaacaagatcgccatccactcggccccagcgctgacgggtccgtggacgtacctcggggctgcagttcctggtggctcgacgatcaacctcgcgggtaaagatgacctatgggtaaggaaggatcatattgtgtcttcctttactccacaatgccatcactaactcgttggtcgttgtcattattgcaggccccggacgttcacaaggttggtgactactactacctctactactccgtgagctccttcgggacgcagaactccgctatcgctctgacgcggtcgaagaccatggaggccggctcttggacggacctgggcagtattggtgtcacgagcgactcgtctaagaagtacaacgccatcgacccgaacctgttatacagtaatctgcccgagtaaggaacgcctgatatatataaagacgcagaatatataaattgatgttaagttgagtatacttttccaatgtactggtttagttatttcaaaatgaactgaagagcagctttacctacgagtccggaatgattccaacagtggcgtatggtcgaagcactaacctttgaccaggcatcctcgcaccacaacagcgctgtcaactggtcgacctcgtagggattatctagcccttcaccaagccggtctagagcctgcatcattttaagtgaggcggagacgcttggacggtgtggacttcatgggtggagtggggaaggaggtgggcttgtggggcgaggtgcaaaagaaaaagtgcgagtctaccactacggtacatgtagtttgaagtctagtaagatcgctaaatgcgcgccatttttcaaacgagggtggagagctgatgattggcactggatttttcacctcagtaccttgcacatccccctatcgccacatcgactggaaaataatattaaatatgtgaggctattagttatacacccgttccttatcgggcagaattctgtacatcttcgttttccgttctgtgcaagcagcaggtcaacgaaagcgttgcacgcacagaaaaatgctgcaaagcttagcaagacgttgaagcgcagtcaccgcggctgctgggtcaggcgaactccaagtgcatcctcgctcgtgcgattgtcaggctcctctcgctgctcgacgccaaaattgctccatgcccgcatatgccaagaagaggtgatcgccatccgcttggtgacagctttcgtcaaggaggcacagtgcaggcagttcctctacactaccgacgccactcgccctccacttcctatttggtgtccgcgttaaaagatgaagctgctctccgtcctcatcgctctattgccgttggtattcgccggactcgtcaacggctacgtgagccccaagctctgcaccggcacgtgcaccaacgcacacgacccgtccatcatccgtcgcgacgacggtacctacttccggttctccacgggcaacaagatcgccatccactcggccccagcgctgacgggtccgtggacgtacctcggggctgcagttcctggtggctcgacgatcaacctcgcgggtaaagatgacctatgggtaaggaaggatcatattgtgtcttcctttactccacaatgccatcactaactcgttggtcgttgtcattattgcaggccccggacgttcacaaggttggtgactactactacctctactactccgtgagctccttcgggacgcagaactccgctatcgctctgacgcggtcgaagaccatggaggccggctcttggacggacctgggcagtattggtgtcacgagcgactcgtctaagaagtacaacgccatcgacccgaacctgttatacagtaatctgcccgagtaaggaacgcctgatatatataaagacgcagaatatataaattgatgttaagttgagtatacttttccaatgtactggtttagttatttcaaaatgaactgaagagcagctttacctacgagtccggaatgattccaacagtggcgtatggtcaaagcactaacctttgaccaggcatcctcgcaccacaacagcgctgtcaactggtcgacctcgtagggattatctagcccttcaccaagccggtctagagcctgcatcattttaagtgaggcggagacgcttggacggtgtggacttcatgggtggagtggggaaggaggtgggcttgtggggcgaggtgcaaaagaaaaagtgcgagtctaccactacggtacatgtagtttgaagtctagtaagatcgctaaatgcgcgccatttttcaaacgagggtggagagctgatgattggcactggatttttcacctcagtaccttgcacatccccctatcgccacatcgactggaaaataatattaaatatgtgaggctattagttatacacccgttccttatcgggcagaattctgtagcagaattgccgtcttgccccaaagttgcgtgatcaggtagcaccaattcccaagaaatccgttctagagagtcaaattgaattggaaggtgtcaacaaagatgacgcttttgttgaaatgcgtagattacaacggacccctgccgatctaacgcggtctcaatcccatagcttttgcggactagagcacggcatctgggtagaccgttacatgcgtgttcctgctgttaatgggcacacttccgctgaacggcgcggcgtcgtcgggtgctctcatcgtaccgctgccgagaaaaccttaatcgtgaacaacgttttcgtagaaatgaactgacaaccttatcgagcaaacgaacggatagttgccatctggcaaacccagatgtattgtgcttttcagttggtttggcgaatcggacgtgtaaaacagctacctactaagatggggctaggttatcggagcagattagcaggtccgtcgtagggaattaggaccaagaattgctagtccgatggaagcacttgcgcaggtcctacaaacagccgaaagcccgaatgtcgcccattttcacggcattcggggtttgaggtcttacgaaggactcctgccaagtcttgtggcaggactttcatacgagctgactctaatacggcgtatgtcaaacgcagaataaacttagggaaacacgatgcagtcgatacgttaaacactccagtcttcgcccttcaccttcgcgagttccggcattgcttgcttccttaaacaaagcttgcttggcttggactccaaccggagtccattgaacggaagactccgggagaccgctcatcggactcatccgagatttgcatctcagatttagagaccgccaacctcagattaactgacctccaaagtcctacgcaggactcggcaaaatgaccgaaaggcacaatacttatgtaggtccagagaaacggtggaagtaatgcttttcacagctgcttatgttcaccgtgttaccataactcggcaaggcggtcgagttaccataactcggtaaggcggccgagatacaactcggccaggccttcgtagctcgaagcctgatcatgcagacaagtcgctggtattgcgcgacctgccaaggatacctcctgctgtagaagtggtctgaggacgctgcttttagcgttgggaccccgtactacgtactataaatagttggcactacactgttgcttggcgagaccatctctagctgtatagcgtcaatatagcgaagactgtggtatgagggctcatgctgcgttctgggccatcgtaagggcaaaagggaccacgttgggtgcgaggacaatcgctgagaatgcggcgaatgacccccagaaagcgtcagattggcttaaagagagagcaggtcggtaccaccgcagcttatggggtgtcttgttaccagaagacaggagcgcgtacttcgaagcccacgaagaccacacatttcctctggctgaagcccctaaaggaatctacgacgagcgcaaggatcgagtccctacatttgttccagtgacgtcgcctcggttggtacactgctcgccaacagaccgcaccgacatcgacgtggcggatggagctctgctgggcagaattggtcggtacaaggaagcgagtacgaactacgttgctactattcgtacgggtgagctactgcgcctctcacaagcatgcagggcgtcggacgaagccaagcaagcgttaagatcggtctcaacgatactgagctgcctaataagcgacgtaggttggcaggtaccaggggacagccgaagctctgttgttggtgcaattcgagcggcggctacagctatcgaagccgcaacaactgttgccttgttgtcatcggaggatgaagtgtccgacatggtggccaagtggcgcgacgacgagtcaagagctcggcgcaaactgcacgaggtgattgcagcaggtcgcgaagacaaaagcttctctgacatctacttgacgcgggaccaacatccaggtaaaatgcaaacgttttccgcgttagggtggctcgacgtggaggacgtcctctcgtatgtatctgcaaacacgctgcgtgatggtagcgaggaagccgaagctggcgatagctctatccgcccggccagatccaaacgaaaaggcaaagccaaacgccgtcgagcccggagtaactctagcagttagttcttctttaataaaaataggcaccccattcgatctagcacataatagacaaagcccttggcgtgctaacctcaagacgatggcgctcgaaaggatggccaagacgcttcatcacccgtgctgctcattagtgcacgcaggttcgatgtcactggcaccgactcgctagagcaagagaagcatttcctttttctgccggctgacacgtggagggactaggcaaccttgctctccttcaccccttcagttcacgactcaggcgcttatgttcaccccctagcacttcatttctattatcaggatgtttgttcactgagaagactgttagttcagttctaaggagttttagttcagatcgaaggctctctcaccgctgccaaacgcattccgcgctacaggcagtactctgttcgtagcttacgccactcttattctactgtatccccctttggggattcccccgacatgccaactgctggtaccggtacgacagcagtcgttgaggagtcgtcgtccaggaaaatagcaggcccgattactatctgcccgccgtaagtaccaaccggaatccgcgaagggatttactgggggtctgaggtaagattgactgagaatttgttgaaagggaaactgcaggcgtttgctccaagaaagtgtttctgttacacatacagtcgatgtacactacatgtaaaatgtagtccaagtgctgccaggatttgggtgtcaacaattatgcatcatgacaaagttgtgcggttgcgagggaaaaactcgccgaaagcaaggaaagtttctaactgattagataatatcttaagttgctccaagttcctcgacgacaacccgtccaaagtatggagcacaacagaggatacgtcgagttccgggtgacgggagttcgtcagttgaaggcaatagcaaggagggacaagatgagtccacaaatggttgaacaaggcaagttgatggaggactgtatcgacagttttctattaatccttgaacaaccaggacgagtacgggtaagcagcatgcagctaccaagagaatcgccattagtggtgatgatgaaatctttagtagtccaaataaaatctcttctacacaacagagaatactagcattttacagttcttcgcattgtttaccagttgtcgactgctgtgatctgccctcgaatccacatggttgttgagcaaatctagtgcagccgccagccgtaactgcagattcatctggcaattacctggccaacgatactcggaatagtcacggcatacaaggaaacaactcgcaggcaatggtagacgttgcggctctcggctcacgcactggcactttcaaattcgaccgcaacagcgtccaacgcaagtcaaatttgaacaatgaagctcctttcgattctcgtcggtcttcccctcctcgtcgctggcgtcgtcaacggatacgccaacccgcagacgtgcacgggagtttgcaccaacgcccacgacccgtccattatccgccgcgacgacggcacgtacttccgcttctcgacgggcagcaagatcgccatccactctgcgccagcgctgacaggtccatggacgtaccgcggtgctgctgtgccgaacggctcgaagattaacctgaagggcaaggacgatctctgggtaggtgccgtgcaaaagcatatcgtatagatgttagtggtgctaacgctttcatgttgttattcccaattaggcccctgaggtgaacaaagtcggcgacacgtattacctgtactactcggtcagctcctttggcactcagagctccgccatcggtctgacgcggtcgaagaccatggagcctggctcgtgggtcgatgcgggcagcgtgggcgtcacgagcaatgcgtccaagaagtacaacgccatcgacccgaacctgatccaggtcggcagccagtactaccttaacttcggcagctactggcagggtcttcaccaggtgaagatgtccacggtccccgcgaagagtacgggcgcctcagcaaaccagatcgccttcacttccaactacgaagtggtcgaggcggcgttcgagttcgcgtacaacggctactactacctcttcttctccaagggctcgtgctgtggatatgacaaaactcgccccgccaagggcaaggaataccgcatcctcgtgtgccgctccaagagcccgacgtcgggcttcgtggacaagaacggcgtcgactgcaggaacaacggcggctcggtggtgctggagtcgcacggctgggtgtacggtccgggaggccagggtgtgtacaaggacccgaagtacggacctgtgctgtactaccactacggtaagattttggttgctgtccctttgtcattgaagttttgattgctaactgtatgatgttgcgcagttgacactcgtattggttacgcggacggcgacaagcgctttggctggaaccagctcgacttctcgagtggctggccgaaggtgtaaacgcgcaggcgtgtgatgcatcctaaatatgtgttaggccagacttggagcgcgtgtttggcggctacgcaaggcgtacaacaacattagtgtgaatgaaaagttttaatacgtgggactgtaaaacttgagacgattcattagtttttgatgatcgaagaatacggcgagttcgctgtacgtactaaaaatcgggctttctgtacacgtacgaacagcgagttcgcgcactgaaaaattttcagtgaaaattcgtcgccaaagtatagggagcgtcgcagggcacgaaaacgagatcggatctacgagttgtaggatgctagcgaagggcaattgatctggtagtgaaccctactgtacgaatggctctggctacgtgcctgtgcaaaatacatttcgtttgtgcggtgcgatgaacacactgcgtattttgctgaaacacttgatagtgcacaacgataacaaacacaacatggacctaggccaagcgttgcgtgtacttatgttgacagttgcgttcatcaaacggaggcgagtgtgatgaacgcacttgccgaggtagcgatggaacctggctcttgttgagagcgaagccagaactacgtacatgtactggtaccgtattctgcggatttgacagcttagagagaagtgttttagtctaattgtgaccggatttacttatcttcacagcctggtccctatcctatcctaggatagcctgcagtgttgtatcgtagtgaacatcgtaggctttagccccaagttttccgctcgttccatcaactgcggtggcttgaagccataccgctcttagctgtaggaacgttaagtacgccgcgatcacttcgaagggtagtctttgacaaagacttcagagcagtaattcatcctgagaaacagctgcatgtttacgagaagcgattggatcgcttttgatgcgtccgcgtcgttgaagcaaatccccagcaggaccgaagattctcgttgcaggatctatttgacatgccagtcctgccccaagcctgcacgctctcaaggcggactgcgtggatcactgcagtctgacagccaaactacgacataaaattcagagcaaatgtgtcgctccgctgcagcatcagctgggataacgcccttgctgggctgtccgagctgaactctctcgagcattggagatgatggcattttcacttctgagctcacagccacacgcggttccagcatcgatccccccattttaactaccatgaagctcctttcgattctcgtcggtcttcccctcctcgccgctggcgtcgtcaacggatacgccaacccgcagacgtgcacgggagtttgcaccaacgcccacgacccgtccattatccgccgcgacgacggcacgtacttccgcttctcgacgggcagcaagatcgccatccactctgcgccagcgctgacaggtccatggacgtaccgcggtgctgctgtgccgaacggctcgaagattaacctgaagggcaaggacgatctctgggtaggtgccgtgcaaaagcatatcgtatagatgttagtggtgctaacgctttcatgttgttattcccaattaggcccctgaggtgaacaaagtcggcgacacgtattacctgtactactcggtcagctcctttggcactcagagctccgccatcggtctgacgcggtcgaagaccatggagcctggctcgtgggtcgatgcgggcagcgtgggcgtcacgagcaatgcgtccaagaagtacaacgccatcgacccgaacctgatccaggtcggcagccagtactaccttaacttcggcagctactggcagggtcttcaccaggtgaagatgtccacggtccccgcgaagagtacgggcgcctcagcaaaccagatcgccttcacttccaactacgaagtggtcgaggcggcgttcgagttcgcgtacaacggctactactacctcttcttctccaagggctcgtgctgtggatatgacaaaactcgccccgccaagggcaaggaataccgcatcctcgtgtgccgctccaagagcccgacgtcgggcttcgtggacaagaacggcgtcgactgcaggaacaacggcggctcggttgtgctggagtcgcacggctgggtgtacgggccgggaggccagggcgtctacaacgatccgaagcatggacccgtgctgtactaccactacggtacgttgtcgattttagtggcctttgttgctttcagtctgaaatactcatttctcgtcgaatcttttgttacagtggacacccgcatcgggtacgcggacggtgacaagcgttttggctggaaccagcttgacttctcgagcggctggcctaccgtgtaaagcaacctgaattctgtttgttgtcatgccacacgacatgtagtttgagtgccccacagcagaatgaaactggaatctggggtggtaaccttaacctactgcacgaaaagttgttggaatttactttagtaatgcgcaggtgatcaagtgtacatgtagttcatgcagtagggaggggctgttgctggagacttgagaacatgccataaggaaacgagtacaagaacacgtctcctcttctcaccacttcgttcgatgaagtagaccgatatcaggacgcttagcgccagtccgaaagctattcgatccatcctatgatacacgcactttaggccatgtgtctcgccgaagacgataattgtaagcttacttgtgtttccagcgtgcttacttacgcaattgtcgacaaatttgtagatttataattgtgcagtattgtaatgcaaaaactacactattccatgtatatttacacaattgcgttcctgcccttttaaccggtccggaccggaaccggaccgctcgttcagcaactcaagcgctaacgttgcgcgaggcggccagcgagcgtgcggctccgcttgacgcctgaatcgaccgacccaacccgctacggcagcacgcagctaaggcagagcaaggcgacgatggtgaagcccgtggtgaacgccaacatgaacaagacgttccgcgaggtggtgggccgcttcgtgggcgccgccccgcagctctcgcacaagcagaaggtgcagcgcctgtacaagcagtcgctcaagacgctcgactcgtgggtcatcgaccgccgcctctggaacgaggaggccaccaagatccgcgcgcagttcgacgccaaccgcgagctcgaccccgagtccgggtacgtccttgcggcctctaaatgccagctttttgccccgattccggtggtcctgacgtcaatttactgattattttaattgttttatattatttgtttgctgccagcctggcgaagcgcctggtgcgcgaggcgcaggagaaggtggaccactacacgcacccggaccgctatatttttaactacatgcccggcggcagtctgttcatgcgcaacgcgcccatcccgctggacgtgtgcttcccggacggcaacatccccgacgacgtggagctgtcgccgctcgagggcatcaacatcgacatgacgcccctgcccgccaaggacacggtcttcgtcgacttctccaagaagggctacgactaagcagccgacagggtcgagagcaggagagagtgtttgctgtaccgtgctgagcaggaaggacgtgatcttcaagcaattacgacaagaaacaaatgcaagggaagaacgggtaattctgcgggtgttttattgtgcgtgtgggtgagttttggaggttgtatgatgctgacacaggtagagaagctcaggagtagtcgagttggtcgcagatgcgggacttggtcacggcggtgttgaggccgaagtcgcggtaccggaagccgttgaaggagttggtgaacgtatttggccgtccgagatgctccatctcgaccttcagctgcgccttgtcagcgccaatgtctcggtagctggtggcgtacatggggtgctcgcctcgggcctcagtgatccccttgatgtcgatgggctttggcatgacttcttcggggcggatggcgtactcttctggcgctgcgacgtcgactcttcggatggtcacgacgccggacgattccacctctgcgttggcagcaccggacgagccttgttagtatgtcctcagcaggatcgcaaggactgaatgaagcacgcacctttgtggagtgtgagtttgtccatccgctgactcaaccgcgagcgttcctgagcgtggaccccttcaccgagagcccccgacgtcgtctggtacatgaactcggtcaacgagttcgttgatcgtggctggccagtcccgatctggttgttgctcgagctgctgcggagctgaggagcgtcaaacgccaccttctcgttcaagtcgatgccgacgatgcccgagctcgtggtcatgaacggattgttggtgcggcgcgtgtggtggatggtcgaacctcgcgataccatgcttgcttatgtcctagtaacaacgctacagcagtggtgcggttcacgtgtgaagaacctcttgggatctcgaatgccttcctcctcttcctcctcctcccctctccacttcagcagaaatacccgcacggatcgcattattagcggctccatttccggcgcatgttcttatcggcgtattgatagaccacttcaacatgaagttggtgcgttgcctgccaaaggatgcatgcaacgcacttgcactgccacttcactgcagccttgtccacgtcatgcacataggcatgatcggttaagtccggttctcaacaccaacacacaaacagtgagaccatgcagaccgtggggatgttggagctgtggcagctctcgtggttgatagccgcggccggtgcggtgctctcgttccggagtagcttctgccggggcttcgttctgcagggaaagatgcgcacccccgtggctgtcgcgcagctccccggactctcgttgctgcgcgtggaggtgcccaagagctactggacttggttctacctcgttggagcgctgcacagtatcctgatgctggttatcacggtcttctggcaagacaccgatgcggttcaatacgccctgcatctcgcacacccgtcggccgaccaagagctgatcttcatccagccacacaccatcgcgttcctgacgctgttctcaatccacacgacgaggcggttcctggagtccctcctaatcacggagttcggggatgcgaggatgcacgcctgcagtacgttacccttaagaagctctagtctttggaggatgttgcattgatagagctttgctgttgttactgtatagttttgttcgtaggcacctaccactacgtggcgacggtcctctccgttctcttcgacccggactcgattgtggcgcacgagttcacgatgttgcgtctatcgatggcgggacttggtgtcgtcttgttcattgttgcgtccgaccaccagtcgcgctgcaactacctgctatcgacgcagaagcgcgtcaacaacatgaggcacgtgatccctcgcggcgactggttcgatatcgttcgcagcccgctctacacgaccgagatcatgctatacgcagcatttatcttggtgactggtggttcgacgacgatgctgtacctcgtgtctgcctgggtcgtcgggaaccaggtgctcctggcgcacatcagctcccaatgggtcgaggacaaattccgcgaccgcctcgacgagctgcccaagtggaagctgctgccctatgtgtggtaggtaaagcatagcgtcggatagaatactacaagtacctgtcaatgcagtcaatgcattgaaacaacaagcaagatatcgaaatctattgacgtccagcggcctggaggctaaggacggcgtgagatattatctttagtcgtccgccttctgcttcttcttggagggcgcctccgactccttcgtctcttcgtcctcatcactcgaggagctgctgtcgctctccttagccggttcgtccctcttcctcttcttgtcctccgcgtcgctctcatactcctcttcctcctgttccgtggcccacacctgcgcttgagcctcctccgccccctgctccttctgcttcttcttcttggccgcctcctcgcgcgcgatctggatgcgggccaggtactgcccgtacttgttgccgaagatgttgtggtagccgccaggtccggacgcgcagcccctgcagccgctgtgcttctcctgcaccacctgcccctccgagagctgctgcctcggcacgcggcagatgctgacggtgccgtagttgtagttcttggtgttgatggcgaacgtgctgcagagccgctcgtagccgggcttcttccacttggcgatgaggttggcgtccacgagcttgcgtcgcacgcagtagtcgtacacgtcgcgcgagatgcgcttgtacttgtagaacaggtcgtacacgtagcggctgcgctgccagttgatctggtgcacgggccacagcgcctcgcactgccgcttgccctcgtgcggctcgttcatgcgctcgcgcagctcgctctccagcgcgtccatcaccggctggatgtactcgtagcccgcgggcgcgcggttcttcttgctccacttggacatggtcgccgctgcaggatagatggaggtgttggctgattcaatggcgtgctttgttgtgactagttgagctatttattcggctatttcggtaattaaggaattttatatacaaaacagaagactacaagttggggcaagtttcacataattacgtacttagccatattattttcaacaagttagtcgctcagcatatgcacgatggacgcttttcgacggggaggagatcgaagaatactgagacaaaagtatggatccacaccaagtcgctgaagtcgtattcggaatattgcattccaacggaggcgcatcgccttgttagcgaatccctcgtcgacgtcttccgaggcgctctgcatgcatgaagcaattaatgcctgtgcgtgtcgaatggactatgaaatacacttcaccagccttgttctgcagtagcacttcacgcaaactatgccaacagcaagacgaatcgcttccacataacagtgcaaaaattcggactcatcaatcaaaaacatcgtagctgacatcaaattgccatcacatcttcactgcctccctccctttatccatttccgaattagctgtcgtacaaccaagtcgagcgcccccagtacgatgccagaagctccatcgattagccccgcgtccgtagctcttgcgatcgctgcaaccctgctgttgctcgtgagcacgctcttggtcgggcatttcggagcgtatcccgcgctattcactgctggagcccccaaactaccgctggcatcaatcgctcttgccgctcttttcgtcatgtttgtgatggtcgtgatcagcgtgatgctgctagacaaaggacgcctgcgagacgaacctgtcccacgcgtcagcatggttctctccggaagcttcttattgcttttactattgaacgcgaacgtacaggcattgcggtacgacggctacaccgcgtgccatgcacaagaactgcatgtgaagttcaacgacttgatttgcgacctgcgcggcactgaggcctgctcaaatgggggtaacttcgatcaaatgcggaggattttggcgtctgccgcagccaacacaatgccaacgttagatacgtcgacacgtgcgcgagaatactgcatgatcaagctgttgcgtgaccgtggatttcttttgcaataccagcaggaatttttggattctttgaccataactgacgcggttgacaagtggtgtggaagcaaagtgctgggcctcccgacagatacaacttcgccattcacgccattctcgacgaatccgactagttatcattcgttgcggacggcgccacttgaagaattgagattaatgacgatggctgtcgggtcggcacttgtttgcatggcgttgttgtacttccacgagagcagtgggaaggggaaagtgaagaaggcttatggactgaatcgggtgaagaaagactagccagcatttgatcgtgggggcttgagagaatatcagttgaaacagcattccctttggaagcgatgaaagcacacccaggatttcaagttttaactaaaaacaaacctcttctgtttcgtactttggtatcaccgcagttaagggctcgatagcatgtcgcggcagtgacccacgcgagccacaggtaatgggttcaccgcatcatgaccagtcaagcttcacacagagtgtgtgcatctggtatgaggttacagactaagcattttgtatgatcaactgcttcgcggacccacttcgctttttctcctacaaaagcctcaaaggcgtaatcactatatcaaaacattaagctcaagtccctagtggattgccatccgctgccgttccctgatgtgatgtgttcggcgggattcactacatctggacgtcattgatgttctgccttgcgtacatattggtttctaaagatgttgattgcccattatggcttttactacaccttaatcgttgcgtttgtagacctaactatcattttatgacgtactttgctatgtttggcgccgtgcaacctttttcatattaattgtcaataattgggacaatactgtattgtattggaatcgttgatctccaataataaaaatagtattgcaaaacccaattatttattggatcgcaattattatttcggacctctgatttgctgatatatgatagcggagaaactcaggaacaacagcacgactgcagcgagcgcaagagctgcggacactcggctgggctgagcatcgctaaattgaagaatgattcgggctcttctggtacattttacaatccattgactgaagtttaatgactgtaaactatcagcttcttgttgaaccttcccgttaacgtaatcgatgggttagctatttagatacaacctgttcttaaacaaaaaaacaaacaaagctaagacaatctcaccactattttattaattttgttgttccaagaagcaatagaattgtaaggagctgtactacagtacacttcaagatcccgttgctatttcttgcgccgttttgctcttcatcggcttgtccatttttcttcgtaccgcttcgatcgagaatgcacactaacgccatacaaactagcgccagccccgtaaaaatcgactcgatcttcacgcagtcgagccacttggtttgcaatgtgtgatacgcgcccggattcgttaaaatcggagaaaacggtgacgttgcattaaccgagaggccgactgcctggctcccacaccacttgtcaaccgcgtctgtggtgctgaatgaatcgacaagactctgaccgtacgtggcagctggaaaatatccccttcgtaatcgagtacaagtagtacccaagatggcccatatccaacagcttagctctgcagtagtcccagacgcgcgtcgcggtctccacctttaatgtaatgttgtcactagaagccaccatccccagccgtttaccaaagttgtctccatctgcacaaatctcagtgccgcgtaggtcgcaaaagaagtcgttaaacttcgcgcgaaactcgggattggcgatatgagcttcgtaaaccaatgcaacgacgtttacgacggacaacgaggcaagcatgaaaccaccagatacgactatggcggcttggagaccgggattgtttcgcaagggtgcattgcgaagcaactgagcgcttgcgatacccatcacgagcgcaacgactagagcaagaagccacactgcacatatcagtagctgcaggatggcattatcgaaaggtgtttcgatcctcggtgtagggcgaagcacggtgcagatcatgcccagaatcaacagcagagtacatgtagcgctgagcgcaagagacgcggagactctggacttgctggaatccatcgcacttgttcttcgttggtgaaagaattgagaatgcggtttcaaccaagacgctttcgcagtgatgcgtgtagactgcggggcaggtaatgatggatttttatgttttggtgtcgtcaatcaaaaattcggtaaaaattaggactcgcgaaggctgggatagttacaaagtcagttaggttcatgaaagtcaccacctcgaaacagactgcctaccgatactcacgactaccatatcatcgtcactacctggtaaaaatgattttactcagcttggcatcgcgcatacgatgagcaagccgctgagttagtacttagatatgggagaaccctgctcctacctaaaatcgtcgtattcctaaggattttccctaaaatccgacatatgtttcatgtgcaccacccaaatattaggactgattttaggtcaagatgcttgaaaattaagtaccgtgagtaacattagggcgagggcgagcggatgcgagcgcgagactcgcttggtgcattcaccgatcgccaacacccgccgattaggcggaggcgtgtctgcgcgagcgagcgaaggcgagcgctgcaacccgaaatttttttttcagacaccgcgcctggccgagacgaggacttagcgtaaggggcaagggggtggggcgggccccccgcggccccgtcgctaagtccgcagacgagagccaacgcgcgagtgtcctgccaagctatactgaatataagatgtttattaatgtgtctctccggattttaggcaagattttaggagattatgtttaggacagattattaggaattcgacgattttaggtacgcacaggggagttccttagatatggccgcacaattgaactcgttgctaactattgcataggaagatgctggtcaaaaaatcctcacgcttagataatgcaatccgtacgagccaaatctcagcacaaatattatgtgttgttgttccaagaaacgatagaagtgtatgagctctacacgtccagattccgttgtcatttcttgcgtcattttggtcttcatcggcttgcaatcatcaccagcttgctcagttttcccctcgccacttcgatcgataatgcacacaaacgccatacaaaccagcgccacgcccataaaaatcgactcagtcttcacgcaatcaggccactgggtctgcaacgagcgatagccttccggatttattgaaactggagaagacggtgacgttgtattaactgagcgaccgattgccttgctcccgcaccacttgtgaactgcgtctgtgatgttgaaagaatccttgagaagactctgactgtgtgtgtcagctgaaaagtgtcccctttgtaattgagtagcaggttgcatttgaagatacgccatattcaacaccttagctctgcagtagtcccagacgcgcgtcacggactccaactttactgtcgtgttgtcactagaagccgccatccccagcactttacgaacttggccttcatcagcacaaatctcatcaccgcgcaggtcgcaaaaaaagtcgttaaactttgcgcgaaactcgggactggcgacctgggcttcgtaaaccaaagcaacggcgttcgcggcgaacagcaaggcaagcatgaagcttccaaatacgactatgacggcgcggaggccagggccgtctcgcaagggtccattgcaaagcaaatgggcgctggtaaaacccatcacgagcgtaaggacaagagcgagaagccacgcatgtcagtaggtcgaggctgctactgtcgaaaggtgttccgcccctcgtcgggagcgacacggcggtacggatcatgcccagaatcaacagcagagcagcggagacctcaagagacgcggagactttggtcttgcgggaattcacttccggcatcgcacttgttcttgtttgctgagagaattgagaatgctgtattgttcactgtgttagtccaccaactaacgattgactcttttagccgagatgtgtcacgtgtcatcaatcaaaacaccggcaagctagtgaggacttcaagtgacggaacgttgcgcaagaaatggtagtctagctacagattcccactgctaaaggtaagcgctttacgtaaccgaacatctatcgattaacgatatcactactgcagtgcttgattaagtaataattggttttaacactgacagtcaatatcttcgaaatcccttatctgtgtactacatgtagctccaacagtgccgcaaaattgatcaaaactgatatgttggtcattccagggttttttttgccaacatacacttgattgattacggccttgtgacttcgctcgcggtagtaaaccaactcgatacaaaccaacaccagcatcaatgtaatcgacgtgatcctcacgtgcgtgggccacgttgtcagcaacgaatcatacacgtccgggttcacgatcaccggcgagaacggtaaagttgcattcgtggacagccccatcaccttgcttccgcgccacctgtcaaccgcttccgtggagttgcacgagtccaggaaacgctgctcgtagggccgaacagttccttggtggctcacaagtttgagttggcagaagtctaacgcgtgcgatgcggtctccagccttgaagtcgtgtcattcgtagacaccaacatctccagcagcttgtcgaagttgtctttctctgtgcaaacctcggtgccacgcaggtcgcaatagtagtcgttgaacttgtcgtgaaactcattcgggtgactgatagcgcgaccctcgtatcggaacataccagcgttcacgatcaatagcaagacaagcaggcagcttccagacatgaccacgcccacgcaaaggccgggtctgtcacgcaagggcctttcgaagaacagcattaaggttatctcgaccaccacacgcagagcgataagaacagtggtggctagcaacaaaggcggcaggatgggaacgtcgaaaggcgagcggatcgccgttatcgcaagaagccacgaacagatcatgcccgcgcacaacagcacggttgcagcgatcgcgatcaccacggaaactcggttgcggagcctcatggccaggcgtggcagattttgtagaatggcaatccagctgagtgttgattttgacttggacttgtcaatcaatcaaaaacgaaaaaatcaagttaagatgaggactacagtggaaggatcctagaaatgtattttattaccgcctaggaactttagttgaaggacgttggatgccaaggttttgcgttcagctgtatcgatggaaatgagagttataaaactcgagtcagtagttttaaatcgtcctctcaagtcccacaaagtgtggtgactagctaggctgccagttcttgcgtcagctcgtccttcaccggtctaaattcaccgccagctttcttcattgtcctctccgcgcacagctcaaagcagcctaacaacaccacacaaaccagcatcgaccaagatcgacaccgacctcacgcgcttgagcggcttcgtcagcatccactggtacttggccggattcattgagactggcgaggacggcgagggtgtgtttgttgggagacccaacgcgtaacttccgcaccacttgtcaactactggagttacaatgaaagagtccaaaacgtcccaatcgaactctaacgagtcaaggccatgcagaaactcgaggctgcagtagtctcgcgcgtgtgtcgaggcctgtactctcgatgttgggttggctgtagatgacactgccacgagcactttgtcgaagttgtccccagctgcacaaacctcagagatccgcaggtcgcagatgatctcgttaaatttatcgcgaaatgcatccggataactcgcgatttgaccttcgtaccgcaatgcttggacgttcacgaccaaaagcaaaaccaggaagcagactccaaagacaatcatgaagacgcacccacagtaagattcctgcagacgtctgttgccgacaaagttaaggctaacaaagagcatcactaatatgaagagcacgttgataagaccaattgctaatagcagtgactcgagagagggattcctaagcgacgtggggatggcatcggccatcggggatttcagggccgtgatcgtgctcaggatcgacagcaccgttgcagggaccgcaagagttacggacacgaagtagtggggtccaatttctggcattgcactagagggggcggattcaagaagcgcttacgataataaggtgtacggaccacggggtgataatgcaatcataatcaaagaatacttaaaaaaagaacccgagaaatggaagagaaatcgatatgtttgtgccattctcgtcagtctcgatgaaccatcttcacgaagtattgtgggtactacaagctgaacaacgagtgcagtagtgtaaggtattttacagaaatttatacggcacaaaaccctttgctatgtacttcagtaagtaacttaggcatgaaccagatgcagtgctcacaccaagcgcggcaggcgttaacagagaaaaataaataaaaaagtaacttaggcataaacggtaagacaatgcgatatcgtggatttcgtcagtattattgatggccgaaaaagctgcagcactttgctctcatcggcccaacaagtacatcgtacgtcaacgctgcgctctattgatgcaggtcagccgccgatctcttctagaccgcaacgttgatgttcgactctacctgatcctgaccggaagcagcctgctactgctgctactgcttgcgaattttcaagcgctacggtacgaacttcacgtcgcgagtaatgaggacgaattccacgcgaaattcaacgactggatttgcgactcgcgcggcactgacgtctgctcaaaggcgggcagctatgataaagtgctggggatgttggggcctacgggcaacagaacatcgagagcagagacatcggcgcgtgcgtgggattactgccggaaaaatctgctgcggagtggcgaatcgcttacaacctggattcgtgcaacatgaccgacgcgattgacaagtggtgcggaacgaaggcgatgggactcccatcgaatacaacgtctccatgctcgcccatttcgacaaacccagggatatatcgagcgttgcagatggagttgccgaaacacttgaggtcggcgtcgatttttgtgggctcggcacttgtttgcatggcgtcgatatacttcctcgagggatgtgaaagaagttacgtttccttacgctggtggagagcacgaagtggtagtctagccaaagtgttgtcttttcatagtccaatctatcattttgggttcgctgaactaacttcgaaaaactgctttgccgtgtacgtggtgttcacctgctcttaccgataagttctttcactagacgacaggaggttccaacgaaacgttgacattgcagagcatgtattaattgacttcactattaaaggagaagtacacatgccaaaagcagagaaaccacgcaacaagtctccgattgtgaagtggcttaggatttttcaggacgctattaactaaagttaaatggacaactgtgatcatcatcatcatgaattgacttcactatgtatttcactagctttgaatgttcgatccctatttcagactcctacagctccgatttatataaatcaaggtccgatataaagttgtaaatgagtttaacgtggtttaccaattcatgacctctgaccagttcatggactaaagcgactattatccaatccaatcttcttatttggactaatatggctctgattggctcaatatttttaaaccagatcttggccctcacttttccttacgctgatcccgtcagatatccgaggcggccttcacagacaagcagctagaagaagctattgaccgcgtcctcgcaggagaggagctcgcagccgtggccgactcgtcaccagtgtcgttgtcaacactaaagcgcaaagtcgccgcgcgcatcgaaggtcgatctattgagcgccaacggcccgggcctgcccccctactgcctcccgagtgtgaagccgatctagtgacatggatcgctgcaatgcagcgtcgtctggtccgacaagcaatggtgcactccaagcgcgtaaaaacaattgcgccgaagtgcctgcagtggagccgctgttcatcatcgagagcgcgacggtttgagtttggtatgagactttgtatgggacgcgtcggtccaacatctggtcagtgcgtcataaaaaataaatttccgctttgtttgctttgctcatatttgctcataaattgatgcgaggaccctcaaaattaagcgtgccgactgcttgtataaatgctagcgttgtagcatcgctgctctaatattggtgtcgtcatcgacgatttcgcatgaagtgctgctgacgggtcatgaattggtaaaccacgttagggcgcaaaaaaatccctgcaagccataatagaagcaaaaacctaactcgttttgaaaaaatcgacaggttgtaccagccttgtccacgactccacctatttaccagcacgcaaccgtgcttcttatcaattcacggacgtgtctatgatcaaggcttcttgtttcaacaagatccatgttcgtttacagccactggacgcctggccaaaagtatatcaaaccgtcgacatatctgcagcagatatgcggagtatatgccggtcatagatcccgcgaggcccagatttcgtgtcgatagacagccctacccctatgaatatgtcgtgtagtcatcttaaagatttaacttgttatttgtatactttaagtcgaccatcactctaccgtcattcgggcgacatactgcctcgcttatatcttcctgccgccaacttgaagttgcgctcacttttgaaatagcctccgaaggcgcgaagacagcaaacgatctccggtacgtgagctgcaattgcagtaagtgctactggctgttggctaacaccgtgtgttacagcaggaacgatggtgcatctgacgcactccgcgatccactggaagctccgatgcatcgtcgactcctcctcctcctccagcgacgagaacacgccgccgaacgtcagcagcgcccgtgccatgggtgctgacggcggctccagtgcgacgggcacggcgacgccgccctggctcactccagagcggaccaagcaccgatccaagcgcgtggcgaacccgccggcaacgccagagacgccgacggccccgctgccaacttcgggggcgcgcacaagcccgacgacgtcctcgcccgtgctcctggaaacgcctccaagatcgctgccgcgcgccacgacaagcacgacgcttcaccctcgccaagggcgtcaagcacgccaagccgctgtcgccctgtactcacgccggcgcttggggccccgccatgtgccgcgcagccagcgcacggagccccgtcatgtgccgcgcagccagcgctcggagacccagcgcacggacaacattcgacgagcgacacggccagtaccggcggctgcgccccgtgctcaactgcaggcgtcacggccgggggacgtgttcgcgccggcacggtggccgtacgccattgctcacttgcgcgagcaatacaacccgttggccaccgtcttcccagcggtccagccattcggcttttgcagttgctggaatccctgccggaccgacagctgccgcaacgccctcgtcaacgtgtactgcaatgcccgttgctgcccgtacgggggcaagtgcggcaacggcttggaggagtcaagcaagatcttcctcgaccgcaacttccgcacccagcagctcggtgttgtcgctgccgaggacatcagcgccggtgaggtgctcggccagtacctaggcgagatcgagcacgtcagcgtatctcgagccaaccgcccacgcaacaacggctaccgtctcctgatgaagcagcggcccgagaagccgacgtacccgatctgcgctgcgattaatgctgcagggatgggaggactgatgcgcttcctgaatcactcgtgcgagtctgcagcagagttcagggaggtgtcgaacgggcatcgaacgacggtggtcgcggcgacgacgcggcgcatctaccgtggcgaggaggtgaccatcgactacggtgacgacctctggttcgtctgccgttgcgagcgagacggctgtcgccaccgcaacatccaagacgaagaagacccgtgagatgacagcagcgtagcaaggttgctaaggagcgcggagcatcgagtgaagcaacatgcatgtatgagtgaatggacgactgaatgcaggaaggtgtttgaaaattaagtgtattgtggggacgaagtgctgctagactacgggaatgctccgaccactgtgagtgtgatttggcgccaagacggcttcgttcgaaaggtctcgagccggcttcctgctgctgcgtttggcactttgggcgcgaagctttcgcgcgctccaggttgaagctgctaagagcagcatccttttcaaattggtggcggtggcggcatggtgctggtcgagttgccgccgcttctcggcgcactcgtttctctcacttttgcttttgccaagcaacgagcaccctcctccaagacgcatacccgccccgccccaagcttcaattccgcgcgcttccagccctggtacgctgccccacgcgagattcgttgatgtcaagcttgctgatggggttgttcaacttgttgtgcatgtagatggtccgacaaaccggaaaccccaactacaccacggcggacgtcgactgcctcttgctgctgatcgagaacgagcttccgctcggacgagacgagtgggagcgtctagcggcgtcgtacaacgccaacagacctcgcggtgcccctgagcgagactttgaaagcctccgccgcaaattcaaagtgctatacagcaccaggaagccgactggcacgcctaacatgccgccgcacgtcaagaaggccaaggaggtgaagctggcgatcgacgagaaggccaacgtcatcgagatggatgacgaggccgacgaagatcgccccatcgagcccgacttctgcttcgaagcggaccccgacgagagcttctacgtcgacgacgacgccgatggggaaggcgtgcagacggccggccggcccagcactgaagggtcgacgtgcaccgacgagtctgtcgggctcgactccgccgaatccgaatcgcctagtctgggcgagtttcaagagctgcttgcgacgccactcacgagtggtgggtccggtgacggtgcacgtactccacgaccggcgcctcctccagcaacgtctaccacgcgccgtgcggcaagcgggccgccgaaaccacgtcgaacggctgtcagctccgttgccgccaatgcgagcccaccggcggctccgcagcagacaccgctcgctgctgcttcgcagtcaacaagcagagaagtaccagaagctcgtgaacttttcgaaccgcttgggcgggcaggacctgacagcgttccgtgacaccgtcggtgccaagcctgcgctcgaagaagacaaggagaccatggaggcaagctttgcaaaagcgaagcggattcgcgccttgaggacgtccactgccctcaagaccaagcttgccagccttgaagccgctgcgaacaacacgggcggaagcctgctcgagacgattctccttctccgtgaggagaacgaacgcaaggccgaagaacgccgcgctgaagaggacaagcgtcgccgcgccgaagtcgctactcaagaggctcgctaccttgccaacaaggccgaagcccaggaacgccgtcgtcaagaaaaactcgaaagagaggaccgagctcgtcgcgaccgtgaggatgcgcgcacttgcacgcaggagctgatcatgctgatcaatgccattaagaagagcgcgtaagcaaagatggagacgaaggaaggagttgttggccctgcacctcgcagcatggcgcattcatattgtagtagcgttgcatttatctcaaagccgttgaatcaacaacttttcatatacagcatcttcatcttcattcaagtcgtgctcgctgctaaactgcatcgatctctaacttgcgaaaagcaccatcttccacgttatcatcagcaagtcctacaacaacttcacatcatctgttcagcattagtgtacttgcaaggacttcgagaaattctacgctacgcaaaatatattgttgccacgctacttgctatgaatcgctcactacttaggcaacctgagtcggcacctccatctcgccagcaaacgtggttcggatctgcgagatccccaccgttcggaccctgtagttggccatgcgaaacaagttgtccaggcgaagtcctcggaacttggggtcgtacggcagtggcaggttgagtctcgagtagaccttctgcacgcttcccatgccccactcggccgcctggcggaccgaggtgatggcattgtgaagggtgcgcgccgatgccctcagcgacggcaggatccgctcgaggtctccgtccttgaggggtgtgagaatgcgccccgccatagctgtcgaacagaggaaagcggagtcggagacgacgttcatcctcgaatccgggcaaaaggctggatcgagtagcttcaacctaaagccgagcgacgtgtccgagtcattccatgaacccagacagttgtgtcggctccagataatgcagccgtcggccgcaaagcagatagttcctgtaacgaaaacagaatgtagccatccattgtacatagcattttgaagatctgcgttggaaggttgctgcacctgcagcatatagccagcaatataggttaggacggataggatcgaatgaatacaactgcatacgtactttgaagttcttgccatcgatgaaaccaaaagtgtacttgagcaggggctcgcgtgcctcgacgagctttgccagctcggcttggcgcgttggtgatggccacgaaatgcgcgtcggagcatacccatggagcgccttggacagcgtctcctctgcacgacacaggatgcgcgagagcgtgctcgggggcaagccaaagagcatggacagcgagctctgctccatcgagccgacgtagaacgagagcaccagtcccaggacttgatggtggtaccgtagcttgggcgggcggccgcgcaacttggccttggggatgaagtagaagcgcgaaaaccttcgcagcaactgctcgaaagcaggtctgcagcacacagtcacacgttagctacatacagctttgtatcatttaactcgatcaataaatgtacctggtgagactcgtcgcgtttataaagttgacatcgctcccaaatcggtagaggagcatccaggccgagttgcatggtgcctcgaggcactgtgccgtcaggtagtggcgacttcgcatggctgtccgccacgcctcttccagcagcaagcggtacacctcgcgccgcgcctcggccagctcccgcccctgcttgaggaaggcgtccgtcacgacgaggagggcgtccgtgtccgcgctcgccatcatcgctgagcttgcttgcgctcgacgcgcgcgagtccgaaagtgacggaatctagaacaagtgcggcagcagtgctcccgcttcagtgtccagggcaaattgacaggttcacatcgaagtgactagtgtagccacctgattcagggcagtaggaaccggacgtagacagaagcaataagacacttttggtgaagctttcaggcgatatgccgacatatatcttttttaagccgggcatatctgctgcagatatgtcgaccgtttactatacttttggcaggcatcgacttgatgaaccgcaagcaggcttgcaggatcgcctacttgcttacttctcgtcgaagaacttctcgagcgactggccgaacttgccgtcgaaaaagatctccgagtgcgggaggcgcaccgaccttggcgggcttcgcctcgggttcgcgtggcccagcgccaccgccacggggatgctgtagcggtccgggatatccagggcctgcttcaccttggccttccatcgtgcgcgtggcgagtccgtgcacctgggcggcgtataggaaggtggtggcggcgaacgtcgtctgcttgtagacccacgcctccgtgggcatgttcgggtcgtgctcgcccgaaaagaactcgacgacgggcgggatcttgctcacgaaagcttcgtgggcgccgttgtcgcggttcagctgctgcaagcgcgcaacgttcttgctgggctctgtagatagataccacagtaaggagaatcagaacggcagtcatctagtccacccagtactcattggaatagcgtaccgcagtcggccgcgaagacgaccgagacggaggcctcgttgaccttgcggacgttgctgtccaacatagcgctcgccagtctagcgcggtcctcagcggagcgcaacacgatcgcgacatagggctgcgtgttgaatccggtcggggctcgctacaatagcaacacttcctgcacatacagccctgcgtcgagttgaccgatggaatagaatggatatttcacctacgtaagcttgaggatctcacgaagcatctcgtccggcacggggtcggacaggaaggacttgcaggtgaagcgctcgctgatcgcagctcccagttgtttggccatcctgtgcttgttgttcttgtcgttgtggtggtgtactgtgaaaagcaaatgaaaagtgaactacgaaatgccccaacttggtgcgagtaatcaacacttgctaggggaatgattgtgtgccggacgatatcacgtggctacagctgtaacattacatgtacatgcggatgtgcgtcacgtaacctacaaagcgggaagccctggattttggatttttatttatttacttggatctctacacggctgctcgcagtcatcaagttttgattatcgttttatagatattgccacttgtgatactaaaaagagtaagcttccagttcggggaataaagttaaaaggggttgtagtttttagcaagcgcgcgtactgctggcatttgtatgcggctttcttgatcgacgtctttgctcagttggtgaagtcacccagtttcgccggctgtgccttacgatcctttggattgctcgaaggtgatcctctttccacgcaagctgaggagcatgagcgacgtacgcgggcgtgcatggtcttcaaacttcgagatcaagtgctatggctgaaattaagtgattgaagctgtgtgagtggcttacagcttgagtggcgtaatcttcgccgtatcagagacttgcacggcctccaatgctcttaaacaggtaggaagtctaagcacggtgtttagtagtatcgtcgacaacgaggagcttgcgcagcgtagcggtgacggtggtgatggtggagcacgtaatcgggtagcttaacattgactcacttgcaaatactttggcaagccgataaagcattcacctcgcttatatcacattctgctttttgcgttcacagtttcgcgagatcctgctgcgctttctgcttcatttccttgttgtaagcgggacatgcgcactcttccgtttttgatgggcctctagtatttaatattagtttgtgtaatattgctggttactcttgtgagtgaacttcgtgactataatatcattgtgttagatgtggattgagttataagagcattcagttttgtcataaaacgattgcatcgttttaggtaagttctctgaaatttatttcagagtctaccggtgatacccctttccgcgctgtttgaatatattagactatagcaaacgccctctttgcttgaatgctacatctgctgtacgggtcaaccatttctcaaacttcataaatagagtcttttgttaaaaaacacaggcttcgtaatttaaagggtctgattgtccggacattttatagataagactacacaatacgcagttatcgatgcagagcagtttgtaaaacccgttatatcgtatacatcttgccgttatgaatcatccacgtgaatgttgaccctgtcggcgacgcgtccatcttcgcgcaacccgcaaccgtaagtaatttatacggtaatttatggcgtgggtttttcttgggataaatgcaacttcctatttatcccgtagggtccgagccctgaaaattccaggcgcaagcccaacccaaggccgaggtcaacaaggtcaaccgcgcgtgggctgcccgggcagcgtttctccttcgtgtccaccgtggcgccatctccacgcgccgtatcgggcgcgtcggcctggcgagaacatggtggtcgaggagatgctcgcgttctgcgaaggtctgagcaacccaaagctgggtgttggggcctatcatcgtagcagctgcgaggctcatgctcatggctctcgcacgcagatcaaaggtggggtcacgcactacggcgcagcccgctcggtcaactacgactcctgctacgggctttacccggaaaggggcgaggagtacgcggacgggtccatcaagaatatccatctcgcgggccacagcgacggccaagatccacacccaagaagacctcgaggcgctgtgcaagaaccccatcaatacttacgtggagaacaattgcgccacgatgctcagcaccacgctagtgaatgacactatcgccactaccgcagaggcgactacgacggacaaacccgaggacttagtgcagtatcacgaatcagtagtaagtgagtataactagcttttgctgttctgttgccctcctacactattcatcgttgctacctctcacgacgtagctttctagccatgccaacgtcgcactagaaatttcagagcttcctcgtgctcagcacgactttgttattcataaatttgttatgatgctatcaatccaaaattgggaggggttttgggattaacatgtaaaatccagtgaacagctgatcgagttactcatgtttcaatgaagcatacgtaaggaaacgaatgaagcaacttcatacagggcacattgtgaaccgcggacggccggcgaaatcatctccctcgcacgcgttgattactcgcagtcagggattgacagtaacacgatttacgaaaaacctcctatcccgaactaactttgaaaatctactttgtcgtgtacgtggtgttcacctgctccagggctacactgaccggtaggctggtatcctagtttaatcagcagtcttcgtcacgtttggaggcattttaaaacttcacatttaatggcaacttgttctcattatgcatgttgttgattgccgaacattatcgtttgcgtttcaatcttgttgtccatcaatcaaaccaaatcaaatatagctacttactgtaaaatacccacctgccttattttgaaagcgtcgaagcagtgtttgttcattcatcaatttgctgacaacaaccaactccaacaatttcaaccgcaatgccggaatcgaagcctcctcaccgagtgtccacagctctcgcactcactgcagccgtgctattatttctgagcgtgttctctgccgtgtaccccccgatatcggagaccccaagccgtttgaccatccggccctgcgtcttctcctgggactacaccttttgccgcccattctcaggttaatcgccggccaaatttggcgttaccatttttgggtacacaaaagtatccaaactcaggagtaccactgtattatctcaatcaaagttggctaatccccaatcaaaacagggcagttccttcactacatgtactgacgctccatacttcatgtcttccatgcggatcgcggcgttcacggacttggaggcatgcagctccatcttctgcaccatgcactgagtgatgcggggcatcgagacgtgagtaacgcgctcaagaagacgcatgcgcgcttccggcttagagatgtggagaccgccgccgatctgcgtcatgggcgcggatatttcgtccctcgccagcgcgaggttctgcttgatgttggctttgagtgaactgaaacagttctcaatcggggatccacgcagggctgtggggccgcaggtgacgagagatggccgtctcggagaggctcactccgaagtcctcgtacgccatagcccgcaacgtgcccagcgtatacaatcagcactccttcagccagagctcaagggccgccttgatttccgcgttcatcttcatggcccgtcgagcaactttttttgagataatacagtggtactcctgagtttggatactttttgtgtacccaaaaatggtcacgccaaatttggccggcgaataacctaagaatgggcggcaaaaggtgtagtagctattgcagctttgggtgtcatggttataatgacaatgatcagctgcctattgctctgcaaagtccccctgcgagacgatcatgaagctcccctctttctggctctctctggaagcggcttgtttggcttgctattggttgcgaacgttcgagcattgtggttcgaaggccacctcgcgagtcatgagggcaaattctacactaaattcaacgacttgatctgcgacctgcgcggtactgaggtttgcaccaaagcggacaactacgacaaaatatttaatatgttggaatctacagttaactcaatatcaagggcagagagttaagcccgtatgtgggattactgccgagcaaacttgttgcggagtggcggatctctcccgtcataccagcagaggttcctggattctttcaacatcaccgacgcggttgacaagtggtgcggagccaacgcgatgggtcttccgatgaatgcaacgtcgccattgtcaccagtctcgatgaatctggagatgtatcaagtcctgcagatggagttgcccaggcacataagatcggtatcgagttttgtggggccagcgatgtgtgcatggagtggctgtactacctcaaaaaagcgaggaaaagaaaacggcaagcttcgcgaccaggttttgaacaacaggtattattcagatctgacggcgggtattatccagagataatttataccgttttttattaccgtcatttcagcttttgcctcacagccaccaattcgagggggccaaatccagccacgtggcattcgacgtgcggcggttgctcggccctggagaccccatatcaaggcgcagatggccatgctcaaaaatttgagttctgttctggttcctcagttctggtgcctccttctggcccctctgttctggtggcttcgctacgcaaaatggtcatcgtgaactccaaattcagcaagccaaaacgcagcagcaaccgcagcaacaacttagacagcatgactcgcaatccatcgttgcagccgcctcaagggcagcatcgcggagagcggcagcgacgacctgtcgtggtcccagcgttcaaggctcagcacgactcgtggccactgctcgacgtcagcatgcaggagtacatggaggcgacgcgacagaagatcgtcatcgcggaggtgataaacgtcactcgccgcaacgcagacttgcgtaagcaggttcgcttccaagggcctccgaactccgagattccgctcgtacccgacagatgggagccgtatcagcgcaagtacatctacacacacggctgggaggagcatgagaggtcgactgggaagaggacgtcgcacaagctccgccgcacggactgtccgtttcagatgctagctcaagtcgtcatgcgccgagatggaacgtggggcatcgtcatgaagcgcgaagtctacagccataaccaccccatttccgacagtatctacaggtcttatccagatattcgccaggttcccgcgggctctgctctgatgccggacattgagctgctagtcgacgccgacgctgggacttcaagcatctacaactacatttgtgagaactccaaccaccgcgtcacaatggacgacgttcgaaacctggttgcgcggatgcacaagataggcaagttattgttgtgataacatgagttgtctgtgaaactgactttattgacagtgatgactaggaattgagctatctgacgacgactcagtggcggagatgatcgtgaatttcaacttggagtcgccactgaacgtgtcctcggtgcatgagaacgcgcacggcgagactggcgtgatatccttcacgagcggtcatatgcgcgctatgctggacagattccgagaagtgattcaaatggactgcatgcatcagaccaaccagtgagtatctgtattatgtttacagattttggctacgtgttaccaggttttgatcagcttgttcggaaagctgaaacgctacttgaagggccacctgactatgcgtggaagcctgaaagtcctactggtctaccagcgacgaaaggaaaaggagtacaaggccaaggtggagatgcccgggacgttgcgagacgtttcctactgtgagcagattaacattgcccttggcatgacgacgcgttgggtagctgcggcgatcaagacgcagtatgacgtcgcaacggatgactcaattgtggcgaagtggatccgcgaaatttgcagatcgcgggggtcctcttgcacacggcgcccgaactgccgactaacggagggggtactccgatcttccgtgaagttgctgatcctcaacttgtgtacccgtcggtgggctggatcgctcttcgggtgatctcgataagacgcgcttggggttgagtcttagactgtctggcggacagcgggagcttgtggcagcaacgcggatatgcttcacgctgtgccggagtagttgtggcggtttcaatctggggttgtctggatcgacactcgccggccaggtgtcatcttggcctggagttgccttgtggtcggtgtgtgaccttcctttcctttccttgcttgccgcttcctctagcggtgggtcgaagtgagggttgacggacgctgggccaagctatcctggtgtccgaggttccttgatcttggggtgtaagtcgactcacgtagtgtcgggtgggccaaagtatatcccgtgcccgatattgcgaaggcgaagaccacttgtgaagaaggaggtaaaatgaactctgtttaaatgttagctttgcctaagtccttgtcctatcgttctcttgccctcttatggtcctggcgcgtgctctctggctcccttgaacactggtgatgccgctggctctccgtgcagtgtttgtgtaacccatggggctgataacatcactcttcttccgagatcacgtcatcctcgccaagaccgatatcgtcgacttggatcggatatactggggattggctcgccagcatctccgaagaagctgtatcacttgaagtcccagactcgaccttcgtgctcgttgatagagttccaaactacgccgggccgcacgtcgttggtgttattccacggagtcgatatcggccgccttgttgatcttgggttgtcgatgctgtccgcacaaaaatatcttcatccactacaccacacaattgttggcaattacgcattcaaggacaatggcacgacgctcaccgtccagtatgatgaacacgagtatacactcgagaaggagggctggagatgcaactgtgagttcgcacaaatcatgacgctgccgtgcagagacgcgatggcgtatcggaagacgtgcgggaaccctctgatcattcccttctcatccatatcacccaggcgacacgatggaattggagattttcgaggattccccgagccgcgcctgtgattggttggctcagaggctcactatggaagagggaggcagcgacacgtggcgtatgggaagagcggatcccggccggactcgcgttggcagtgtacaaggtttggtgaccccggatggagatgtccccaagagcggaccccggctggaaccaagtactgaacgagaggcaaagcccaagggagcgtagaagtgcctccgactggaggccgcctgctcttggtgcactgtgcaacgcaagaggagcccgaccggatcgagtgaagtcccagaaaccgtgaagctgtccaagacatcccggatgtgaagcccaagtggcagtgtgatcccgtttggagataatcatgaatcccggatggagataccaagataccaagataccatcccagatgtaaagatccagtatacaaagtccaagatgtttccgaccgaccacgccgaccagccaagatctcttcggattccgtggaacattgaacttcgcttgcgtacccagtgatgattatacttgctggaagtgtgctacgagggaccgcggacgattacgacgacaagaccatagtgaagacaaggcaagatggagtgcatgtaaagatcgacagaagatagccagacagacagagagagagaccacagataacagataaacagagttcgttttacctgcccggtgacaagtcgctttgtagctgcctatggaagcacaccccgtaggaggaagacaagtggccaagccggaccgcgtcggggctagtgactgcgagcgcatgcagccgggaacgcccgggagcgcatcaaggaagtaagctcggatggaacgtcgttgtcgtgaagttccagtaggcgtgctggatcgtcgtggcgccgacgccgtagctacacgcgtgggcaagacaactctccccttcggaaaagaagggttcgtgctaccccgtcggcgatagctaccatggaactgcctaccggatggagacgtgcccggaggaccatggggcatcaaggctgagagggattaacccgtggtgaccagctaccttgggggttgcctgcaggaagaacgatgcttgtgggactaaggggcggatgccgcgcccaggcggagatagttgaagttactttggagttgctcaccggaaggaccatacctgggggaccaagggactgatgctgcgaaacctggacgtacgggggaaaacacgacccataaaacccagaaaaactagaagataattggatgaataagccctaaacaaagagttcgttttgccaaggatcgcgcaagtgagttggagcagcctaccggacgtgcattcccggaggaccgactaagtctacgtgtgagggcccagcaactgttacatctgggtcgagctcccgcaaccaagtccagtccaagttggggtgagtaccgggtgacaacccgaggttgatccatcccatttcatttcctagttgcggttgagctcgtccagaccaggaaggccccgcatttcatattaccgattactttgtcgccccggttggagtagcccgggtggtaagtacggatttaagagctatcgtgtgataggaggtatttgattgtgttagattccctcaatacttgagggtggtgcgcgtgagccaaagccgaccgggattgaccagtatcccggagtccggctggagttgactggagtagtgaccgaccctttcacggtccaaaagaataaggaagggctacgtgtttgtatataactctgtatctgtttgtattgtttggttgtctgagggctgtcagaggcgacatccaggaaggttacgttctgccctgctacctagcgacctacaagtatcaagacaactcatccacggttgaagacccctggttacgaagacaaacgaacccacagggattgttcacaaggacacacgccaccccggttggagtgtacatctaggtgtactatatccggatagggtttgttctgggtgcaccccattcgggagtctacacccgggacgcgccaagctatacacctgggcggtcaggcgttcacccgcctcgcctcacaggtatgtccaggtttcacctatgtattgaccaggtattgcaagttggttcaggtattgaccaggtattgaccatgtttttgctgaatttgatgatggttcggccagagttgcctctcacaagatgaattgactgacgttgagcagccttttgtggcgaaggtgttcaagaagaagcctcgcgctgttgctggggctctgagcgaggtgtggtatagcagtgcacacaaagtcgtcagttgtggtaacttggctacaaacacaacaatagccgagctggtcggctttgttggcctgcgccgggttgcccccgagcggttcggcccaaccgggacagcgggtgtctcgcctctcgccgagacctgccaaccaagatcactcctccggagaaccgccaagttcgacggcctccgttcactcaaccctgtgccctccaccaaaggatggacgacggccctcgagggcttttacgggtcgccgagagcaaaggcttctcgactcagcaatcagcgcccgggacgtacgggaacaccggctcgcagcggtggcgagactttccttcgcgcttggcgagactcgcgcccaacccgggccgaccttaatctcttggcgctgccagccgagtaccatacaggctatgcctctcgggttccggcagcagacataatccggccccgtgcagggacttactggaccgtgtacacgtgctttaggcctagaaaattctgctctattgtttgttatctctgtcgggcgccctgaaggggcacctccactattcctaagctcctatacaaataccaaatgaaagtgggcggttttggatctcggccgactcttcgctgagctcggcgacgcttgagctcggctggtccggatgagctatccggataattcttcgagctcggctgagccggataaggtgtccggataagctgctgagctcggctgagctcggctaccggtacagtgtaccactccagccgagttggtcgcgcgaaatctggtgtttcctacaccacaactgccccggtcatgttccgagccgagttggtgagggacctgaccatcactccttgagtcgagtccaatctcggccaaaactccaacggcagcgaacaagtctccgcgccatgtcgtcgtccggctctcctgccgctcctccggtacgttcctcgcctccgacagctccatccattctgctgctgacccttcttctactgatcttcacagacttcagttgcgtcgtctttgcagtcttcacatccgcccgcgcgagatgaggggaagtttgctgagttggtcgactcggcgtcccgggctcgcggggtcagcgatgggcagatgcaccctgtcatcgatctgacaacatcccgtgggttcgaccgggagtccgagccggcatctcgcacttctcatcgctgcttgccgagtccgcgtggcgacaccacttcggacgccgccgaccttggtcggtcggactcggctgggccggtgagtctcgactctctcgctgcgctgatccatgcgcagtccgagcaacgccgcatcgagaacgcggacttggctcggctgttgtcgttcgtgatcactcgtcccgcgccggtggctgatagagaggtccgccgagctgccctcgaggcgacgtccgtcagctaactcgtgagcctccttcgcggtcagcgccaaccttcaagtcaagctagtgacgtcgctgcactgagggtcgagctggagtctgctcggactattaacgctgacttgactcggcggctggattcacaggcggctgtgatggccgacctcgaggaacggttgaagactgtcgaggaggagcgtgaccgatggaaagccgagtcgaagaagtcgtcccctcttctgaccagcttccggaaggcgatggccgagtctgaagcttccttgaagtcggctcgcaagtctcaggatgataaagtgaagtcggctctcgctcacgctaaggatctcggcaggcagctcagagaacgcgactcggagattgagcgtttgactcagcttctttcggctcgtgacgccgagtacgctgtgctccaggggatctcgaccaagcacttcgagcaactgcagcctctccgtgatgccaaggccaccatcaaacaccagcgtgaggtcatcctccgacagacgcgtgtcctttctcgcatgggtcttttacccatgcatgatcctcacatggctgctgcagctgcagccgggttggacgtgcctgggttgagccctgctgacttgcagctcaatgctcggttatgccggatcttggctcaacgtttcccggaggtgatggacatcccggctggagagactcgccgagttgagttgaccatccacccgcgagcggacggcgctgctactactctgccagcgcccgtgagctcagctggttctttccttggacaatcaacccggctgacggggtctgaggctccggcccctccaagcgagtctcccgcatcatctgccgccaatcctgtgtcggctggtgcggtttctacgcccgtgtccacttctgcttcgcgccgtcgccgcagcaagtcggtcgaccaggttcaccgagctcggctggatactctaacacccaccgaaaaattacttcgctactcaaacccgaagtcagcgacggcggctggttctcagcgcaagcccaagaagccacgagcagccgtacgcgtgtccacttcctggtgaggtcggccatgaggacgcgttggtccagcttgaaaaggctgcccaagagactgacgccgcatgcgacctatcgctccggtcgagcttgaacttagccgggttgactgtcgacgatgtgaatgtggaggccggcgacgaggttcactcgctggaagaggacctcttgttcgagttcaccgaagtgcctggttccgccgagcttccgagggggcccgccggcccgaccgtgagtgtaccgcccgtgcaactcgtgccttactcttcctccccggtgcagacgccttcaagcggagtggctgttgtatcgttgcctggatctgctgaccttgctgcaactccgtccgctttttctcttcctgcctcggttccgttcccgactcgtgtccagtgggttcctccctcgaccagcgtgccgagcgcggctgtggtgacatcgactgtcggcgccggaggacaaccgggttcctctgctcccgatccggcgcttgctacaacgcatgctgtgattgcgccgagctcgacggctggagtctcggctgcgggtacaattaacagctccgctgcgattccgcctcggctttcgtgtggtgtagcgggatcggccaaaatctggttaaggcctgatcgagcttcccaccagcgcccagacaccgactaacggaggggttcccccaacgatccgtgatcggctgaacttgttctcaccttgtgtacccgtcggcgggctggatctgctctctcggggctccgaagatgcagcacttggtgtcttggcgtgacgcggggatagtttgtggagcagcacggtagtcttcgctctgcgtccgagtatacgctccgatcgagggttcttcgcttcgatcggtcggcctggagtagatccaaggcctgtagttgcctttccgggtgtgttccttcctttcctgagttgcttgccgcttcctatagcgggatcgaggtcgattgagagacgcagcgatcgccggccaagcagtatccggtcgatcgaggacttgcacacgagagaaagatcactagagtaggtcaagctggccaatgtattaatccagtcttaaccgtaccgctagtttactacccgacgtgtcaacgcttgccgaggccaatgtagctcctgggacttgacgacttgagggcacttgtggtcttctgtgcaaattgcgttctgatttatgtttagctggtctctctctaccgctgccatctcatctaccatcctacaaccaaacgattactggattcttgccctggcttcgcccccatgtggttcccatccgggtcgatcggcgaaccacgatcggctcccgatccacgatcgcctcctgatccacgatcgatcccgatcggcgatcggcgatcaactcccgatcgatgacctgtgcgagttgccgtgcgctgccgatccgtcctcttctgtcctcggccgccctagatctgcgagattggtcgtcgatccgggcttgggtctacgtcgaatcacgccgcagtccaagcgcgatcgcccgtaatctgtcttgacatatgcgttgccttacgcgtcgacgttatccaatcgcttgagatctctcgatagaccctcttgatccgcgaccgcagcctgatccctgcctatcgttctgccaccatgtcgcttgatgtcattgcagttggaaattcttgttcggtgcttcgccacattcgcagtcttctccgggttcggccgctcaccggctcttgacatgtactcgttcccggtttgccaatcaagcccagagtcgtcgtggcccgtcaggggtggcgtcgactgtagtcaccccaatgccgagcactccgtcggtggcctcgacccggccagcggttcctcctagctcagctgggatgacttcccatcgggtcgccctttacgctccactgcggctactgcccgagtgttgaacgctcactgcttggatctgttagagactcctgactatctcgtcctccggtccgctcggtgtagctcttcctctggttcgtcgggctcggctcttggattgaaagctcctggaacctcagcacatccgttgtctgtgtccgagagctctgaatctgaggctgacgaccctggatctgctgacgagctcagttgggccgaccctgacgcatctcgccgggcttcgttagcttctgcgctcccacctccgcacgggaagatccagagctacatggctgctcgtcaatcgcctctcgttccgtccagcgagtcaggtgactcagactcacagccgagttccaagaagcagagcggtaagggcaagcgcaagcggaggtgcaagcacaagctcaagcacaagcacgggcataagcacaaacacaagtcgatgtcgaagtcgaagtcggcagggtcaaagaagtcgaagaggtctgcgtctccggactcggctaaggacccccgcccgtccaagcgtcagcgaggttggactggggactcggccgtcgatccggctgaggtttcggccgcttccagctcgactaacaactcggctgggagctctggcatcccatcgagctcggctgtttcgccgtcgcctatttctgctggtccagcttcaaccctgtcggtgcctatcgtgaccgctcatgacgctggcgcccacgttctccctcagtagcctgcagctttacgctattcgctcgctcagctgcgcactcgagctcgccaggcggtcggccgagatgcccggatcactccccagctagctcagctgagtgacatccgcttcgttcattacgggtctcggcggtgctgggaggcaatcctcagtcatcaaacggccaaggtcactgtggatgacgcgtcggcgaagggtagtgtgccggttacgctctgttccctcgctgagattaaagcgttcgcggacgtctaccatccggatcacccggctcagcggctccttcgtctgcttcccaagactcctatcttcttctcccctcaagtcctcgacgatgccaagcgccggttgacgaactcggtgaagtcggtgaccttgatggagcgtctcgcagaagtgttcgtgaagatccgcggagaggctccgaactcggtttgtgacaaagagggtcctaccaagttcttcgtagcactgttcgagcggtgtcactggatggtcgagtcgagtgtgctgatggggctacatccggcttttcacacggggctcccgtatcacgtgatagccgagatgtatgacacgtgggtgttgtacaagttggctcgcaagcgtcgaggcgatgccctccgaagtctcatgcctatcctgccggacgacctgttcactgcagtgatgaagcttctcggcgggcttgctgccccggaaattgacgcggagctcttcttcgagccgtcggtcccgttgtatccgctggtcaatcttgcttggattcctgcgggcagagactggtgtgctgaagccgagtctatagacgactccgagccttggcgagcttggtggttgaccgacccagcgacgcacccgtacaacacccgcttccggacgcgtaacttggaattcatggttttcgctcccgctggtgtggatccgcgcctagtcgaggatgctgtcgacgaagatgtggacctcgacgagcctgcgcctccccagatttcgtcaagtgctccgactccggtcaaccgtgcaggaatccacatcttccaaggttgtgaagctggtgagctcggctgggccgctggcgatgcggatccggcgtctccgttgatcgggtcgcctaacgtgtgcgacccttctcccacggcttccctctttggttcggcgtcacctgggtctccagctgagtcgagcgcaggatcgagtgtccctctggctaacaactcggctattccggcttcaagctcagcggactcggctgtgcagactgcgggagcagcggatagctcggtcggctcagctacgaacactgaaggttcgattggtctcctcgcagcggctgctgctaccgtcgtgttctctgtcgcgcattcacagggtccttcgtcttcgtaacgtgcggctcagccgccgagctcttcttcctttcccagcattcttcggtgtaattcatgtaatgtatgcaatttgacgcagtagcttccttcgcctctgctgtcttcactgagttggcgggttcatcattttggcgcaatagctttaatcctcgtctgcaacttgcaccatttgcagacggttttcacgcttcttctgccgtaagtagtccccacacgacaaattcgacagcggctcccaggttggctcatcatagccgacccacttgaccttgaacttccgctgagttttggaggtgctcgtagagagcgacaactcgtcgtccaggatggcttcgacttcgtattcattcattgcttcgtcgggctcccagctatcttcaggaaggagtttctcgtcaacgtcgagacgatccgactcggctaagtcggctactagcctagttgtcgaccgctcgccgagtcccgtgaccgctttcagacgtgacacatgtatcacaggttagaaacggtatccgctcttgtccgggagttcgagctcgtaggcaaactcctccaccttcatcttcactcggaatggcccatgccatcgatgtggtcaagccaggtctgactcgttccatgaacaaccaaacttggtcaccttccttgaatagtgacttcctcgactcggctaactcgtcaccttcctcagtcgactcggctgctccctcgggtgagttcgctggggtaaccgtcccttcctccccggctgggacagctctctgctcgactcggctgagtccgtcattgtgttcctttgctctccgtttcttctccttcaactggaactcggccgcaagcttcaaagccacctctctctgtcggtgtgcttccctgcgccattcggctgcccccgttgagtcagctgagttgcccctgccgagcctgactgactcggtcatcgccttgattgtagaccgagcgtcccatccgtgtaccacgtagaacgaggtctcccgccgagtcgagtctctcgaattgttgatggcatggacgagcttctcggctacatcatcccagtcggcttgaagagggtcttccacgtacacacgcacagtctggatcatggtcttcactgagcgttcttgctgaccgttggcttgtggtcggtaactcagcgtcgctctcgacttggactgcatcatctccgagaacttctggaacacttcactcatgaaccggggatctctgtcgtggcgtaccagtgatggagctccaaacctccggaacacgttctcttcgaaggccttcgctacctcaagtgccccagtctcactcattgccttagcaatcacgaacccggtgaagtggtcttgaaacaacaggagtgcagtgttgccccgccgagtcttcggcagtggtatgacaaagtccatcgataccacgtggaacggtcgctcagacactacgttgccagatgaatagcccttcaggtgtggtttgctcttactggttctgcagtcttcgcaccttggacatgtttgaccacgtctgcgtacaacccaatccagtagtagtcggctctgaccctgtggtatgtccgcacaatcccttggtggcctccctcgatggagttgtgtccgttctgcaggacctcgtctatcatggtcgtcggaaccaccagtcgaagggataagcctagttcgccgagttcgccaggtggtctggccttgccttgtcggtacaatagcccgtcttcgctgagcacaaactcgtcggcaactttcccagcgttgtgagctgcgcataattccctctcaggtaggtcttcaagtcggcccatcgttgttcctcgtcttgagctcttgctattcgcaggcggcgctcagcttggaccactaccggatcgatgtccatggcgttgggctcccgggcttctccgagctcggctaccagctcagctgggttagctgggttagctggtggtgctgcgctaccgaactcggcttctcccgtcacccgctgtctagcaggcggaggtcggctatctcgttcaaagtcattacgttcggcttcctcatccgtagctgggtccgggactgggtgttctgccgcttcgtcttcgaaacggactgggcggacttgactccttgtcacggcagccatctcaacaccctcggccggggctgcagccgagtccgtgttcacgtacaggacctcagagatcccagttagggtcttcaactcggctttccgtccggcgcttagcacgacctttcctgctttggtttccagtgcttcggtcgctaaagagtcagcagccgagttgtagagacgcactacgtggaggtagcgaactgaactcagcttgctggccaatttcgtgtggcgtgctaactcgacttgcaatgcctccttcttacacgcgatcgcccccatggattgctggatcacaagccgggagtcgcccacgatgatcaaatccgtcaccccgcgctcaatggccgaggtcaccccattgttcatgccggtgtactattcaccgtggtcgatgggaggtgcgcgctcgcagcgatctcaatgttccagtctggcaaacgccacaggatccaagaacaactcccgaacccgccgtgtttagcagtcttcgccgatccgtcaaacgacaggacgtgtcccttgaagtctcggggcacatgcgcatacagcaattctgggtccatgcggaccacagccgagttcttggacggtggagtgacatgcgttagtggcttgtccaatcccactgccggcgtgatggacgcttggagcaactgggcgaaatccgtgtcccgttcgcggactcgcttgacctttaggtggaacggtgatagcagtaccgcaaagctgactgctctgccgtagagagacttcgactggaacacccattcgagagtcgagtagcgggtgtaagcatggatggtcttcccggcgagcaacgtgtggcacaccttgatgagctgtagcaaggcgagaacttctttctcggcgggatggtagccgagttcattatccttaaggactcggccgcagaaccgcactggatggagcttcccgtcgtggagctgcatcagcgtgctactcagagcccactcattggcgaatagcataacctggacgtcctcagccgagttgaagtggcggggtacgggtgcgttgaccacctgctgttttagctcggcgaacgccgcttttgcggccgtcagatcaccgccgggtccgaaatcttcgtccttcagctgatagaggaccgcaccatatacagccaggttctggatgaaccggccgtagtagttcagcgctcctatgaatgcttgcatccccttcttcgtcgtcgggaacggtagcccggctatcgccagcatcgttttctggtcggcttagattccagccgaggtcaccccatgtgacaggaagtcgactttaggttggacgaagatgcttttcgggaagctgacgctgatgcggcattcagtgaagcgttgcagcaatcggtcaagcgtccccaagcaatcgtcgaacgtcctcccaccgaagcagatatcgtccacaaacgatcgccggtcgaaaaccggtgcaaggcacgattcatcaggttcacccgtccggaacatgtcggcttctgggatgttaatgaattcttccaatgggtcaaactcagcttgagctcggcggtcggcctcaaacttggtctggccactggcttcaaagtcgatgtcggctgcgggccgtttccgctgagcttctgaggcggcttccgcttgttggatgcgcttggcgaacaccttccagccgcccttgggttgtacgtaaccccacagagcgttatcaataaggcgctggtagatcattggggtattctttaatccgaagggcatccgcagccactcgaagtggcctatcacgcaaacaaaagccgagatccaacgcgcccgtcgagtcatcatgaccgcccagaaaccgctagcagcatccaaagagcagaaccataggtacgcttccagctccgtgaggagatcgtccactagcggcatggcatactccatgagcaacgtaagcgcgtttaccagcttgtagtcgatacacaactgaatgtcgaccccattcttctttaggacaatcacgatgggtgatgcccataggctgttcgagaaggcaattagccgagcccgtaacagcgccttgagcagctcgtacaacttgccgagatgcttcagcggaactcggcgggctcgttggcggattgccggatgcccctgtacgtcgatgccacacactacgccgtatgctggtggaggtagggcattacgactggagatcatgatcttttcatggttcttcaatacttccaccagccgagtagactgtggccgagtgtgcgccgagctccgaacgtttggcgcttcatagtcgagtggcgtcgacaccgcttcagtcagatcgggcaggaacgccaactcgcgagcatagccttcgagctccaagttcgttgcttggtgctcgaactcggctgagtctcccgccgagtcgcctcgaccatctgtctcgtcctcgtacttggctgccagaaggtaacgtaagcgcaggtcttcctccgggtctgacgacatgggctcgtcgctcacatcgacctcatcttcgagccttggactcggcggcttgggcccggggtcgttgatgatcgtccagtcagacaaatcgctggattgctcactttcacactcatctgctgcacaggcgttttggctgggcgcttcttgaccagccgtcactgtgatctctgctcgactaggcgggccattgaccaagtcagcagtaggctccgcgctcaatgctaattcctcaggcgctagggtagcggtagccgagttcgctggctctgtcagagtcgagggtggactatcggctgcttctgcctcggctcgctccttcgactcggctaacttctcccattgctgggcgcaagtcagtgccgaatcccgcggcttggtagacggccacgtagtcacccctttcggttcagggtagtttctacggtccacagctgacggctgtcgagccagccactcggcgtacagctgttgttccttttgcagcagatccttatccatagccgcttcgtaggccatgacttgccaatctttgtacttcgcggagtgcaacctgacgtaaccatcgggcggtaacaccccatgcggcgcccaggcaaccactgggaaatgtgctgggcaccacgtccaagtcggctctcgagattcaccggttcggtcgggccgtctgtgatgtagaggccgcccttcggttcatccgctgagttctgggacctcacgagaggtaggacaacttcatctggcaacttcgccaccgagttgtacagatccaggcggattccagccggaatcatgaagtccgtaccgagaatcaactcgactcctgcgtggtgatcgaggatccatacttcaaattcatacgtgacctcccagccgagcgtcacctttaccatcgctcgtgacatcgtcgccactttgcctttcccaataccttgaacgccaatctgttggtcctggcatgtgaaccgcttcaaccgcagcctcttcgcgaacccttcgcttattgccgacacattcgcaccggtgtcgagcaatatcttgtacgctggtcgttcactgctcccataacgagagctctcatccgaactcggcggtcaaacttttgtgacgaccaccagccgagtcgctccccagggagcagcttcataactctggtggctgtggtcacattcgtcgatcgctgagtcgcaactgcattgcacaatcttgcttggctttcttctccactctcgccgagctcaccatcaagtccatcgctttcacaatccaatacgtcgtcttctcttcggtcctcgggccttcctgcctcacccacaaaggcaaacacaaagttcgcctctactgctggctcagctgactgtggcagcccggtatcatccaacccagtcagtgttggcgggccgccgagtttaaatcactcggcgtgtagaggtcctggaggtcttcaggtaacttggacttgtcgacattggacttgacaaatgcggcgagcttctcatagcgctggaacagctcgcattgaccgacatcgtgcaattacttgcagaacttgcagcgacggcggcagtagtgaacggagtggtttgcaccaccgcaggcagcacaaggtccatacgaagggcgttcacgggagtcactgcgccgcccagtctggtcacgccgatcgtatcctcgactggcgcggtcagccgagctcggctgaccccttcggtgatcactccgtggtgtcccagctgagttccctcggtcccccgatctacggtcgcggtcgctggtgaacccggtgtcgatgtaatcgtcttccgagtctacagccgagtcggagtagctcggctggctgccgtcgctctgatcgctgtccgagtcgtagaggttggatcgccgattggattcgcgtctctcagccagctcatacgggtcgtcctccagcagcgctgtcgctagtcggcggtctcgaccatcgtcgcgtcggcttcgccggtcatcccggcgggcatctctgcgtcgttcccggcggtcatctcggcgcggctcactccgccgagcttccgagtgccttggcgaatcggtgcgcttggcatctcggctgcggcttccgatgagacggtcgcgctgtttcttccggcgctcccccaggatcttctggttgatgatcttctcgaccttcttggtgtcggtgagctgttgcggatagagcagatccatgatgtcatcatctccgcagtgcaacaggaagtgttccgcatggtcagcagcatccgctccaccggcctcgtactggattttcgccgacttcgcatatccgttgagacgaacgaggaagtcacacaccagctcgttgtctttgcgctgagccgagtaatagcgagctcgtgccgactggtcaaactgcgaacagtagtagtcggcgaatgcctcactcagcagactccacttccgttgcgttttcttcgggagctggcgataccagctcttcgcgcctcgctccagcttcagcgagaatggctcgtaccagaggtcttgtgccagccgagttcctttcatctcgtagatgaaccgcttaagccactggagagagtcatccggtcggtaacgtttgccttcgaacatagggatcttgtcgagggacgcatgggtgcaaacctccaagtattgcgtccgatcactttcagcgtcatcgaagctaaggtgcttgatgacgtccttcaccgactcttcagccgagttcaggtactcgcgcccatcgtcgctgtcgctgggctcggctgcgtctgcagcgccaaacaactcagcgtagcgtccacttggctgcttgccacgcgttggcgtcttcatatgcgaatcttcgaaatacggcgtaccctcagtagagcggaacacctcggttctcttgcgttcgggagtcttcggcaggggaatcctgctggggtcttcgacggtcttcggagtatcagccactcgtttcgcaatagtctgccgagttccgacggccccccgctcgagaccaaacgagactctcaaccgacgcttcaacttgaggatttcgcgtgaagctcggctggggtcccaatcgccgagtagcaggctgttgggccggctcgtgcacccgaaccccatcgccttgagtagcagcaccgtgtcttcgaccagttggttgatgtcggtgctgttcaccggctgagtcagctcgggtcccagcaccggccatctcgcctgagccatcgccactggggcaaacatcatcatccactcgctctgagcttgcatctcctctccgagcctacccagaaccttgttcgcacttggcgtatccgcatccctcgtcgctcgcgggatcaggggcgggcgttccccttgagcggcggcttgatcttcgtcgtccgtatcattgccgagctcggccgccaggttgcgcacaactggacgtggggtacccattcgtccgacttgcagcgacaactcgtcgacttcgctgagtagcccggctttctcctcatactcatcctcaacatcttcctcactttcttggtcttgggcatcctcctcatcgaactggacggtgcgcgcctcgtccgccgtcgcgtccgtgatcatcgcattcgccgagtccgccgagttggtcagtccagccgagttacttccaaccgtcgctggactcggcgtaacaattcccttgaccatcttcacactctcttctcttcttctcaaaccttggttagctcgtacctacgaaacacaagcacacccctgttcccgggtcgcggcaccagttgtggtatagcagtgcacacaaagtcgtcagttgtggtaacttggctacaaacacaacaatagccgagctggtcggctttgttggcttgcgccgggttgcccccgagcggttcggcccaaccgggacagcgggtgtctcgcctctcgccgagacctgccaaccaagatcactccttcggagaaccgccaagttcgacggcctccgttcactcaaccctgtgccctccaccaaaggatggacgacggcgcacggagcgcttttacaggtcgccgagagcaaaggcttctcgactcagcaatcagtgcccgggacatacgggaacaccggctcgcagcggtggcgagactttccttcgcgcttggcgagactcgcgcccaacccgggccgaccttaatctcttggcgctgccagccgagtaccctacaggctatgcctctcgggttccagcagcagacataatccggccccgtgcagggacttaccggaacgagtacacgtgctttaggcctagcaaaattctgctctgttgtttgttatctctgtcgggcgccctgaaggggcacctccactattcctaagctcctatacaaataccaaatgaaagtgggcggttttggatctcggccgactcttcgctgagctcggccgactcttcgctgagctcggcgacgcctgagctcggctggtcccgatgagctatccggacaattcttcaaactcggctgagccggataaggtgtccggataagctggtgaacttggctgagctcggctgagctcggctaccggtacagtgtaccactccagccgagttggtcgcgcgaaatctggtgtttcctacaccacacgagcctctcctccgttggcttgtcgaactcgacactgccattgcggctcgacgcatcgtcgacccgttgtcgaaggtcacgttcgccatgtcatgtcttggcggacgtgcaagaagttgggcgtatggacgccgactctcggatcctacgtgctttagcacgtacgagggtttcaaggaggagctcagacaagcgtttgagcacccgcaaaacgagttccggtcgagggcggagttcctcgacctgcagcaaggcaagcatgatgcccatgcttacgctcagagagcacggtacttggtctcgaacatcgtgaccaatccgatcgacgaggcgaccaaggttgtcacgttcatgaaggagctgagagatgggcctgtgaagaccgatctcttccgtgagtatccgaatactctcgaagctgcaattactcttgcaatgcaggaggagtttagcctgcggcaggctaagctgcatgcacatgtgccgaggccacagccacgcccggtagtgaggacggtaggaccagaacccatggacctctcgagtgctgcaactgctggaccccagtagtcgcagggaaacaacgtgcgatgctaccgttgtggtagagtcggtcactttgctcgggagtgcacggcccccgtgcaccagcagggtggctatcgcggcggtgccgggcaccgtcgcaaccaaacaaaaaacgctggacgccagtaggcgcggggcgccctactggtaatgcagttccgcgtgtcggccttggacacgcgacactgaggaccgcagcccccagtgaggttcattctcactgcaagaaccaagatgacaagcctgaccttgtcatcctgaatgtggactcgatgagagcaagtggctctctccgtgctttggtagattctggcgcgtcgaagaactttgttcggctgcgaagtctatcatggcttgacttcgaggatttaaagatacctcgaagtatgttggaagtacgactggcaacgggtgccgtcgtgaagaccgagaagcgcatgatacgcgtgcgcttcacgtatgaagatcaagagtttgtcgagacctttatcgtcctggatctggacgataagtttgacattgtattgggcatgccgcgacttgcacggcatgatccggtcatcgattaggagaagcgcactcttgtgcgcttcggtcgcgacagcggaacagtgagcgatggtcctgttgccgctacgcacgcaccgacaggtgcgcgcgactccccactcgagacagcgcctaatgccgcagtcccggagcgccctgggcgcgcgcgagcacgcactcaagagcagcaagcgtcggcgtcgccgccgacggctgaaggagaaaatgtgttgatctcggagatcaacacccgcatttcagcgaatcaggaagagtctccgacctcaaggggcacggatgacgcaggcgagtcacacgcctcagccgtagaggctgacgcgaatctgattggatcaggtctggccaataataagagccaaggtgacgtaacgccgtcgactccgggagtcgatggcttgggtgaatttgattcgtcggctcggggagcggacgcaccctccgtaatggagggctccgccaataacaggcgtcgaggtgaagatggcgtgtcggctccgggagccgacgctgcaggcggtgcgcttgcaaacgttccgcaccggaaaaacttgcatgctgtcgtgcagccgggcttgaagtcgctcgcccgcgggatgaacccgccggcggtactacccgtccacggctgggcctggacgaggtcaagaaccaagcggagccgggctccgcaaaacaagaagacggcgcatgcgaagatcgctgcgcaagtctcggcctggggccgagacgttacaaggaatgtctgccgggcagacggaggctgagaagccggacgtcgggacgttgaacgtcttgacgcgtgcctgtgccgggttccggtacagggagatgaccctcgctaaccctccgacgcaagcgtcggagttgacttcgcttccagtcatgagctggaagcgcttcgcgcgtgacttgcacgatggacgcatcgagcaaatatgcattctctcggacgccgagagaacgaagagcgagaatgaagaactgaggcagttcttcatggagaccaccactgagagcgaggacactctcagtgcgaagacgaagaaggagcgctttgaagagcagagctgggactcgttgaaaacgagtccctactacgagatcttacaggagtacgcggacgtacaggtcaaggcgatcgacgacttctttgagagtcgtcgcaaagctggacaagtgcgggaatcgaaatccccgcacagtgctccgacgttctgtgtcaagacgccacagggcggttggcgcatcgttcatgcgtacaacaagctgaacgatgcgacgataccggcgcagacaccgataccgcgaaaagatgttatcatcgattcgatggccaggagcactatctacagtgctcttgatctgcgcgatgggttctatcagatcttcatgcgtgagagcgatatccctctcacggccgtgaacacgccgagcggcatgctctgagagtggctattgatgccgcagggtctgaagaacacccctgcgaccttcaacaggtgcgtgacgcacttattgcgctcggtgcacgacttcgcaccgagctacttcggatgtgttcgtccacagccgggctgcggacgggatgagcgatgttaagatgcacaaggtgcatctccggaagctgcttgcgctcatgcgcaaacacaagctcttcgcgaacctgaagaagtgcaatctttggggcgagcgagatacccgtgctcgggcgtctcgttgggaagaatggtgtccgtcctgaccctgagaaggtcagagtgatcaatgagtggccgacgccgtcgaacgccaaggaactgcggcagttccttggcttggccacgtacttgtgcaagtacgtgaaggactacgcgggcatgatacgcccgctgtcacagctcctgaagaaggacgccgagtgggtttggactgctgagtgtcagcaggcctccgatgcagtcaagcggggctagactgaggcgccaatcttggcggtggccgaccaagatcgcccattccacgttgtgtgtgacgcatccgacttcgcaatcggatgtgcgttgatgcagcacgatcacgagggccgtgatcgtgtcgtctactaccaatcgcgtcaggtgaagccagctgagcgcaactacccggtacatgacaaggaactccttgccatgaagtacgcactcgcgaagttccgagtgtatctactcggaagcaaaccgttcgtggtctatacggaccacgcgccgttgtggacggctgtgaagtcgccgcacatctcgcaacggatggcgagatggctctcattcttcgcagagtataacttccgggttgagtacaaacccggaagactcaatgtggtggccgacgcgctctcgcgtcgacctgactacgccacgactgaagccgacgtcaatgccattgacgccatgcgatcgagcacctccatgtcgtcactgttggacgacgtgaaggccgcgtacgcgcacgacgccgatgcgaatctcttgctggcctatggctcagcaagatggtacatcttgctgcggtacccgctgaagtgactgcgaaacagacggcgcgtctgttcgttgacatggtgttcaaacaccatggcatgccgatcgacattgtgtcggatcgagacccgcgcttcactgcacacctttggcaagaagtgtttacacttcttgggagtcaactttcgatgtcgactgcggaccatccgcagacggacgggcagaccgagctcgtgaaccgcgtgctcgtagacgtgcttaagagctacgctcactcgttccaacactggagcttgtgcctgccgatggcggagttcgccatcaacaactcggtgcatgcctcgaccgggcatacaccgttctacgtgaatgccatcaggcacccacgcctcccaagtctactcgggatggtggctccttccttaagtgggggaggatctacgactgcaacgcagcagtcgcagaatgccgctgacacttgcacagtgtcagccgcgactacgcgcaacaagaagaagaagcacgcgtctgtgcagggcacagacgccgacatgagcaagaagaagaagaagaacgggtctgtgcagaacacagacaccgcgaagacgaacccagaggccgggcctactgctagaaacgagctgaacgagttcagctcggacgcaatcaacttcgtgcagcgcagacaagccgtcattcggtttgtccaagacgctatcgcagcttctgtcgaccgacagaagctgaacgcagacaatgttggtagggacaacactaatgaattcaagaagggttcattggttttgttagcaactcaaaacctgcctaaacatgcagtttccgatttcggggcgagcaagctcgctccgcgcttcatcgggccgttcacggtgttggcatggcaacgcctacacgctagatattccatctagcatgcgcctccatccgaccttttacgtcgggcggttgaagccatacctgcagcacgagccacctagctcggctggcccgaagcggaagccccagcgggagcgaacctctgctccagcgcgtgaacgcgctgggccaagcgtgcgacgcgacctcccacgtcgacagagatgtccgaggcggtcttcgaggcctgagcaacttgagctctcagggtcgccatctcctgcttcagagcggcgaactcacggctctgaagctgctccacagcagcgacccgctcctcgagcgtcgggccaaggtcaaccccaggttaaccatacccggggcgtgttcccaccaccgccgcctccgatccgcgacgcccgcggctcaacacgctggattgttgagcgtattgtgaaccatagtatcccgaaaacgaaccggcagccggttcgttatcgtattcgttggagagggtttccgccccaccaagatacatgggagccacgggacgtcctgctgcaggacgttccggaaatggtgagggagtacgaagctcaccacgcactgccgacgcgaagatagtgcgagcgctgtggtcacctacagcgcccgaggccccacgatcgtcgcgttcctcacgtgccaagaacttggcacggagatccttgagactcgcaggtacacgagtcgtcgtgtacccgtttaggtcgcggtcactcaagcgcgccgcacccggaagacacaacgtgcactgttggccttcgggcacagcgcatggactaccagcgtccacagaagatctgtggagttgctccaacctcccgcgcgtcgagaatgtctcgaagcgttcacgggcgtgcttaacccgctcacggtaaccagccggcttcttgttgaagttctcaacaaaagcattccaactttgacaaagtgcctgccacttaggcactttgctgcgagaagaggtcttcttgctggagaagtatcggagctcgtgatagagtccgatatagtaatcgcgcctttgattcgttaaccgatcaaagtgctgctcctccgccacagcatcgtcgtggaagccgctgcatacgtacagcgggatttcgtttggaggcacggtgttgcccacacggtctgcaatctctgacgcagacggcatccacggatcgcgcgctgcccaggcagcgcgcggagaacttgaagacgccacctcacgcggggagcttaaagccccagcagcagagagcggagtgtcgctctcgccgcgcgaacgcttcgagctcgaagcgtccgagtcgtctccttcacgagggcgtctcgacccggcatgcgcgtcgagactatcgctgtcgatagactccttgcgcttgctagaagaggcctcgccctcttccatctccacgtcgtcgtcttcgtagtcaacggcgtcgttgactacagaggaaccttcgaggacaatctccgactgggttgtccccgacgcggcctttgcagcgagcgcatcgcgttttgcctgctagcgctcatggtactgagcaacagagaggttaccctctgttgcggcggcggacttcttctgcggcgagctcattgcggaatgagctcgagttttctttctcccaacgtgaagaattaacgaattgtcaatttcctgattgacgtgccgtgactcggcgcgtctaaccttgagggggaatggtataacagggttacacgcacaagtggctacagtcacttgtaactctaacagatacgacgtctgttagaggttcgaaagactttctcgaccttggtgtagacacaccaaaggctacatacatttacgaccaccacgacgggtggtccatagagacttaggattcctattggctgagagcagcatatcttagccaatgagcgacatgcatagcattggaattctaccatccagtcgttggcagatttctatcttagaatattacatgtagaggaagtcagaaacataaaacaaaaatagcagttctcattttaacccaaaaacattatttggatcgtttatttagattaatctatactcggaggcccgagtataattaactctaatttaaactaagctacgcttcctcacatacacgcgcacacgtgtaggctaaagtagtgagccaaagtaggtccactacatagggtgccacatctgacgattttgtgcgtgctactacaccacaactggtgccgcgacccgggagcagggtggtttgttttcgttggtacgaagtcaaccaagtttcgcgtactgagcaagatggtcaaggggagatcgttgccgagctgggccagcccagcgacggctgggggttcgcttcacacgaagccgaactcagctggcggaaggatcgccgacatgacgatggaagcggtcccaaccgttcggtttggcgacgaccgcacccaagaccgaggaagagatggaaatatcagagattatgatgaagaatggaagaaagccgagttgctcagcggggtggctgagttctcgctgcatgttgggcgcgtggagaaacctcgacgagcccaacaaaacctcgcagccgagctcggtgacgatgcggacgacgacagtcaagccgtcgctccaggggaccggccgcccctgatacaacgagcgacgagggcatccagcgcgaaatgcccgagttgggattcgatgccgaacgtctcgtgggaaacctttccactcgactaggggcaatcgaagaaatgtgaaacccgtctgcaaatggtgcaagttgcagatgcggtctaaggctattgcaccaaagtgatgatccgccgactcagtgaagacagcaggctgggtcgagtcgaagaatgatactgcctcaactgtatgaattatatgaattacatgatatcgaaatggagtgagcgaagatggagctggaaagcaaggagcccattcgccgggttagcgttggagtcggcgcggccgccacagccaccaggctggtggaatccgcatctcggatcgaagtctcagccgagttgccgaggtgagcgattgagcccagctggtctgacgacgacccagtgaagaagctgagggaggtgatggtgcgtctgcacagattgagcgagtcagccgtcgatgccgaagctgtgttgactcgtcactgggtccgtgaacacgctacccactggggcactgtgtgtgatatgcggcggtacgatcgacacccttgggtacgaccgccgggacctccgaccaagtcggtgaacgatcttcccgttgtgcactaaagctgagtgggagcgcaggtgtgctgacgcgaagccgtgctgatatggagccacgctcaagcaggaaagccgaagcgaagtcgagttcgcacgatgttccagtgaggccgtaatcactccatgtttaccgagaggcgactagccgagtcggtcgatgcgcggcggcggtgaacaaaccgaagttgcagcaaagctggacttgagcaaagctcagcggaggcacgctgggcaggcgcgtcgccgagaatgtcgacgtgccagcaatctcgaacgggatccgagttggtccgtagctgagcagaagcagacacctgctttgaagatggactccgacttcaatcgatccgacgtagggctaccaccgagtttaactgcggtcagcctgaagccgagtaggtgaaatcgccgagtcacggcgtcgcaaaagtgtacccaacatccaaagctggactgaagaggaatggattccacgcggccgcggtcgtattcacattgagccaacatgagcagagcttggtcaggggtcgagcatagccaagtcgaaacaccccttcaaagcgctgatacttctgctaagggactgagctggtcaggcaggcagctgtgtcgttcgctcagccgagcttgcctatcaccttgctcaactgggctaagctgcaacggaatcaatgccaggtggacatcagtcgagctagcccgggttgattcgtggcagagccacaaaacatggggatcaagtggcgcctaggcgaattgcagcagaggtttgtcttgaatccgagctgaatcgggatcaggtacaagtgcagccgaggtcagcaccaactgagttgaaccacagtcaagctgaagccgagatgcgttcaagcagagccgagttaaagcgagacagtgcactctgcgtggaagtagtttaacaccgagatgtcgtgaagccgagttcaaccaagccggaacggagccgagttcgagcaacgcttcgaagaagcgctggtcgttggagtggagccgattgaagagcaaccttgctgaagcaaacccacgatcaagttgagccgcctcgcgtccagttccagtgggaaaacatatatctcggtctcgcgcccggttctcgtcggattccagccgagacgacgtaggtcgagccgacgttatgcgcagccgagtccgagcagagctgagctgaagcgagacagagatcacgctgcgtccgaatgaggtcgcgttcgcactgggttgctgcgaagccgagaacattggagtgcgatcaagctggaatgggatgccgagttccagcagtgccgcgggttggatggcgccaatctgaagtgtactcgcttcaacggaaggaagcactggactgagttgcggtacgccgagtttcagtgagatcgcgttcggaagttcgccgagttgagtgctggtaaacgcaccatgttccgattggagagcgctcatgccgagttcgaggtgtagccgagctgaatctgaacacgcttcaagctgaaccgaagataccgaattcaaactgagtgaacgcagccgagctagcggcgagccgagttggaatgtgaccgaatgaagtgctgttccagtcgagcttgcccaccaccttcccaaccaagctgagcccagtcggggtaagctggactaaccgagctggagacatgccgaagtcaaggtccgttggccaatgagcccagctcggcccgttcaggacaactcgactggagcatcaaacgcatcgggatcgccttgttcgtttataaaatgacacagcaacggtgagagctaactcaacgcatcaaagtgagtggggcaaacacttaccaggctagttgagtcgatgaagcggaggctgtgttcaagtccagctgagttcaaggtcagcgggtagcagctagtcgtcaggacagccgagttcagacaaagctgagttcaacttgctgctgcacttctcgccaataagctcagctgggttggatttcgagctcagcgcggcccgatcggggaagcgtttcttgacctgacgagttcccggtgccttgtagcatgccaagacaactatcaagcttcactcgacgcaccgaaacgagaggaacgtgattctggtcagccgagtcgctggcagcatccatggctgctcattttgatggagacagcgatgctcggcttcgtcggtattgcagccaatcgagcacttccccgacacctgcatcacctactcgctttgctgcggcaggcccaacatcaccgctagcactccgagcgtcgacaggggcaccagctgacttcgtatggttcagttcctgctaccggctgccacgccgagacgaccatccaggctgattcgctgctgaagtgatccgacgacggggtttggtgcgagcgataggggcatctacatgtgtacagacacatgaggcgcggagtccacgcatcagacaaggcctataccaaagatcaaggctcaagcaagtctcaccttcacggaacgagggcgtcgagctggcgttgcgggcgtttctcgccactcgaattcgggaaatgtgaactcagtgtttgcgacagatctgattggacgaaatcaagcgtgcgacacatccggttggccaggccactcaccactccggctcgtacattggccggggcagttgtggtgtagggaacatcaagttttgtgtcacactccaaggccgcagtggaacaacgtaccaggagccaagttctactcggcgggatgaccgtccgccgagctcggtggccaagaatgcgctgatggaccgctgaactcggctgatggtgtcagaaactaaaggcacaccggccccgacctggtgacacgtggcagacccagtgatgaagacccagccgagttcaggaaggcactggacacgctcagcagagatcatggggggttcaagccgccgagctcaggctaaacggtaccatgtaccgtccgatacggtaaccaggctcaattgagtccgggagttgcgcagtcgagttcacgggtcgctctgccgagttcacgagtcgccccgccgagttcgcgggtcgctccgccgagttcactgggttatccggcaccttatccggctcagccgagttcaaggggttatccggcatagccgagctcaagcgtcgccgagctcagtgaagagtcggccgagatccaaaaccgcccactttcatttggtatttgtataggagcttagaaatagtggaggtgccccttacggaactcctggacgaagcgcttccaattgctctggacgtgcttctccagctgaccacaccagttccgggcggcgggcgacaacttcatcttgagctctcgaacctcggtctggtcgaaccaaccaccctggacggagatgttggtgaacttctcccaccaggtatgtcgatctccaagcggggctttctcatcgaactgacccagcgtgcttgaattgacatacgggcggagcgtccaggaggtcttgccatccccaaccgtagttgactccacggtcggtgtagcgtcctcgtcgtccaggctgtcgtctgcgctggagctatcatcatccgagcttgaggaactggagcttgaatccggggacgagtcgcgatcccggcgacgtcccttgcgtggcgccttcttgcgattgtccttcctgcgctcgtccttcctgcgttcgtccttccccctctttgactccatcggctccttcttcaccgtcgtcttggtccccggacgggaggtccccgtcggggcaacctgcgtcaccgtagtagatcggtgcgccgcattaactgcggccggctcattcttcaccacggtcggcctcagagtccttgctagacgcgcggacgtcgacttccggcagtgtcgccagtagctgctcccagccggcttcggtcgtgttcttctgtcccgtctgtgcacctgcgaccgttgcgcttcccgtgattacgcccgttgcccgttcagggttgtcacttcccatttgtatgggagttgcccgattagggtcagatgtttcccgttcaggttgagtttgggcagatgttgcttgaaggtcgcgtatctgtcccacatggaaacgctggatattctgagcagactcacgttcctgcgcacgcgcgacttccgacgcctgcagcctggctgccaacgcggccaggtcctgctgggcctgcccggcccgggcggccatctcggcggcgtgcctcgcatcggcttcagccagctgccggtggatgtattccgcggcggctgcctccacacgctcacgtttggcccgcgcggcctcaagcttcgacatctgcctcggccgtcagggactgcgaggcgacctgggacgcctgggcgtagacctcatgcaggtgtcgctcaagctcctgggcccggcgctcggcttctcgcgcctcccgttgggcttcggccagagcaagctcggcttcggcatcccggctgggatccttcccggtcgacacagcttcgcgaagcttcgacggctcggcaccaagctgctggacctgatggaaggtcgacaccgccatctccgccatccccgactgggccgacaggcttgtccgcccggaccgggtggaccggtacgagcgcctggatcgactcgagcgcctcgatggggatcggtctcgtgatgacctccgggtggaacgtcggcggcgacgccgagcatctccatccgagtccgagccactcgacagcgagtcacgccttgagcgtcggtgcgtccgggacctcgtcgccgtgcgcgttcgggatgtcgcccggctggccacctcgtccaagcgtgccaaattggcatcagcctgatcgggggtcggctctcgtttggggaccacctcgcgcgtcacgtagaagcccacgtctccagcgccgaccgacacgccaaccggaccccgtgcggacatcgccaaggatcccaactggggcaacgggaagtgcgacgcagcgctgtacccgagcgtcgaggtcgacgggtccgaggttgtgttcctggacacgtacgactcggacgtcgcgccgtaggaagcccggtcggaggtgccaactatgctcgggacagggtccgaagttgcacctctggccggggcatcccgggcggactcctcagccgacggaaactcggacggcagcgactcgaactgggacggcggggacgcaagcgagctctcggccctcggcggtgcatgctgcagacgcttgtgcgcaggctcaccgggggacgacccgctcggactccggatgggccgaagaccagtcaagcgtaagcataggacgtaggtccggcccaacaagagttcgtagtcgttcatcaatagatctccatccgcgtcttccgtgtggtaatccatgatcggcggcttctctgtcttcgcttgggcctccaacgctggcaggatcttgaacgtcgctccgacgaccagctcgcgccactcgatgagctcgaccgcaagcagtccctggacgcctccgaccacggtccggatggacatcggctccaacttggacactcgcatctccaccaaggccggcatcacgttgacgaactggaaaccagcctcgaacaggagcgtctgcaggaccgcaacgcactcccgcgagtccagcagcccggttgggatctggactccggccaggtcctgggcagtcgacaagtcccgacggctgggtgccaggtcggccaaccaaacttcggccgggtcctgcgaagccaccttggacgccaggtacttggatgtcgcaagcgtcgcggtcagccacagcacggagtccgggcgggactccggccaggcatactccacgttcggcggaagcgtgagcccagaccgggctctctcccaccgggaagcctgcaacgccgcgtacgtcttcgccgcttggacacttgggtgtccggccgacaactctgtgggctgattaccccggctggccttcaccgagagttgggtctccggttgagcatcagcggccggggccaccgccttcgcaggaactgcggccggcttctcctcctcagcagacggtgtcggcttgggttcggcggacacttgcgcgtccggctgcacatcttggccaggcagaggggagtccgaaactcgaccctccgcctggggctcatccacgtcggcgtctccctcagacgcctggttgggttcacccagaccgggatcccccccagcggtcttcgactcctcgcccgcgtcagcacgttcgggctcgccgtccttcgacacttggtgcgcgtcatttgggacggcctgctcgggtgccggctggacttggttcgaagacccatctccggccagggccgccttccgcttttcagcgttaaccctccgagcattgcgttgaacctcttccaggctcggttgcgcgtcgtgcccgccgcacgacgcgactgacgcgacacctctccgcgtcctcgtcctccgcgcatgtctcctcgcttagctgtcatagacgctagttaggaaagttagcacacatcacacctataaacttacagaatataaacaactctggtgaaatccctggttcgaatccgggcacgcccaccagctgaggcgaggcgggtgagcgcctgcctgaccgcccaggtgtatagcttggcgcgtcccggggtagactcccgagtggggtgcacccagaacaaaccctagccggatatagtacacctagatgtacactccaaccggggtggcgtgtgtccttgtgaacaatccctgtgggttcgtttggcttcctaaccaggggtcttcaaccgtggatgagttgtgttgatacttgtaggtcgctaggtagcagggcagaacgtaaccttcctggatgccgcctctgacagccctcagacaaccaaacaatacaaacagatacagagttatatacaaacacgtagcccttccttattcttttggaccgtgaaagggtcggtcactactccagtcaactccagccggactccgggatactggtcaatcccggtcggctttggctcacgcgcaccaccctcaagtattgagggaatctaacacaatcaaatacctcctatcacacgatagctcttaaatccgtacttaccacccgggctactccaaccggggcgacaaagtaatcggtaatatgaaatgcggggccttcctggtctggacgagctcaaccgcaactaggaaatgaaatgggatggatcaacctcgggttgtcacccggtactcaccccaacttggactggacttggttgcgggagctcgacccagatgtaacagttgctgggccctcacacgtagacttagtcggtcctccgggaatgcacgtccggtaggctgctccaactcacttgcgcgatccttggcaaaacgaactctttgtttagggcttattcatccaattatcttctagtttttctgggttttatgggtcgtgttttcccccgtacgtccaggtttcgcagcatcagtcccttggtcccccaggtatggtccttccggtgagcaactccaaagtaacttcaactatctccgcctgggcgcggcatccgccccttagtcccacaagcatcgttcttcctgcaggcaacccccaaggtagctggtcaccacgggttaatctctctcagccttgatgccccatggtcctccgggcacgtctccatccggtaggcagttccatggtagctatcgccgacggggtagcacgaacccttcttttccgaaggggagagttgtcttgcccacgcgtgtagctacggcgtcggcgccacgacgatccagcacgtatactggaacttcacgacaacgacgttccatccgagcttacttccttgatgcgctcccgggcgttcccggctgcatgcgctcgcagtcactagccccgacgcggtccggcttggccacttgtcttcctcctacggggtgtgcttccataggcagctacaaagcgacttgtcaccgggcaggtaaaacgaactctgtttatctgttatctgtggtctctctctctgtctgtctggctatcttctgtcgatctttacatgcactccatcttgccttgtcttcactatggtcttgtcgtcgtaatcgtccgcggtccctcgtagcacacttccagcaagtataatcatcactgggtacgcaagcgaagttcaatgttccacggaatccgaagagatcttggctggtcggcgtggtcggtcggaaacatcttggactttgtatactggatctttacatctgggatggtatcttggtatcttggtatctccatccgggattcatgattatctccaaacgggatcacactgccacttgggcttcacatccgggatgtcttggacagcttcacggtttctgggacttcactcgatccggtcgggctcctcttgcgttgcacagtgcaccaagagcaggcggcctccagtcggaggcacttctacgctcccttgggctttgcctctcgttcagtacttggttccagccggggtccgctcttcgggacatctccatccggggtcaccaaaccttgtacactgccaacgcgagtccggcctagatccgctcttcccaaacgccacgtgtcgctgcctccctctcccatagtgagcctctgagccaaccaatcacaggcgcgactcggggaatcctcgaaaatctccaattccatcgtgtcaaccgcccctcttgttacgatccattgtagagtccattcggcgaaacgatcgatcatgacaagatctcacgatccgagcaagcccagatgtcttcagtcaactcccaactgttgcgtctcttctttgcgcgctgtcccaaccgggttgcttttcatcaatttctctttccagactgcggcaacgaaatctccactcacaacgaaatcttcgcgccaccactcacgccatggacgcccccgcatcgagcgccgacgcgccgcttatcccagcgcaactcccgtcttctgcgcctccagtggggggtacggaggcgggcgcgggcaacggcggcggcagtctggctactagcggcgaggcccatgtgccgaccaaggccagcgaccctgcgcgcaaggtcgacgaggccgatgcgaccatggaggtcgacgagcaggtgggtaccggtgaggacgacgacgccgacgaggaggaagaggaggaggagagcgcagcgtcttctgcgaagagctcgtctctgcacaccaacggccagcctgtcggagaggacgaggccatggaagaagctcccatccgggatcctctgcgcgagcgcacgccaagcgtcacggctgcggtgtccagcctgctgtcgttcgatgaagtgatcgacttcaaggcgtctggcatcctctcgtcaacccatccgggatctcaagaagatgccaacatcctgccttcacgccacgttctcccgcccaagcggcctggtgacggcaactcctacctggtgggcgttcctgcacacccattagcgtatcagtcggagggctacatccaggaggggtatggcggcacggaagcgttagcaatcttcgacgggttctcagcccaggacctccacgacttgggtaacctggttggcaaccagacggagctgcgtaataacttgctgcgcccgcatgccaaccgggagtctcccaggctgccgcagctcgagaccactttaaactcgttgctgaggcgccgggagtccgcctctgtgctggcccagttcccagccgggcgcttcgcggaaaagttgttcttcacgacgtctctgcttcatcgcatcctcgaccgggcacggcgtggcgacatccccattcaagggccggttgaggcatctcccggcgggggcgccaccctgcaacagcgttacgataggcttgtcgacgagcaccggttcctgcagatgtatcaccagcgggaggtggctgcactccgggcggagaagctggagctccaagcccaggtggagaaggacttcgccttggcagcgcaaagccatctggatgaggaaaacgcgctgcgcaacaagattaccgaggctgaggccaagctcgagcgtgcgatcttggccatccagtgtcggcgggtcaccagccaggaggatgcgtttgacaccaaccggctgatgcggttcctcaaccaaggtggggctaccactcgcggtcgatggcccaggctggtacgcctgctgcggcacttccaacggggtccacacctcctgcgcactgggtcaccaacatcgccgtcgagaccgctgatcgtccgtccaggatgatcccaccctatccaggcccagtcaacccggacggcgaggacgatgacgataactaccaggcgggtgacggcaacagcggccaggacggcgatcatgaggagaagtcggaggacaatccaccccagccactccgttcggacttcccgtctgcagatggatctccgtccaaacccaagcggcgtacgtccaaggggtctcgttcggggtcgtgcccacgtggcatggccgagctttccagcaagggtgggccagtgtacgtccaaatgcgaccgacggtccacccggggtctgatgtgctccctcggtcgccccagacggacttcaagcgtctgatttttgactgcgctgcgtccctgccggagttcgtcccttggtcggatgtccggctggatgtccagttcgtaatgcggatggaccatgggtacgaggaggccttggatatcctccgtcaggatcgtccggcccaccagtatttccctaagccttggctgctggcgaagctggtcaagatgatgtaccatggcaccctggacgacactccctggacacggtacgtccccgagaccttctacaagatggctgaggtcatgctccagggacgtctccggtcgggtatgtacccgaggaatttcctcctccgcgtaacctggctgaagatgctgccgccgagatggagatcgtcgaggtcgatgactccagtgagagcagtggttccagcgactccgactacgaagacaaggccaagacatctacgtccaggaagggcgcagatgggtcgtccaaggcggagtctatcgaggacagcagctcatctgacagcgacactgatgaggagcagccagccaagcccaagcgcaatcccaagcggaaccgcgtcgagtcatcttcggacagctcgtccgagggtgaaccccagtcgtcttcttcgtcgcagcgtcggtctacccggttgtcgtcacagaaaatgcctcaatcccctcggtccaagtttgcattgcaggacaagcccgaccggccatcatccaagaaaaaccccaagaagcgcagccggacgtcgaagtccaaccgggagggtgcctggcacagaagtcctacgaggacctgaacagcagggaattggcgatcatcgagaccccatctggggacattgtctcgtggcgtcgtcgttgtgtcggcactcgtttctctccgaagaaaggtggcatcgagggccaggcgcctgggtttcctaattacgcacctcagcagcctgagaccaagtacctggccaggcgttggccttcagtcgaagatgagtatgcggccctggtcgagaaggaaccctggctggagatgtttaacaaccgggtcaaggtcctgtacttccaccgccgtgatcagcaatctccagctgtgatccgcattctggaccagcatgtggagtacatgaaggatcgcctcccggccttctggcacattctacattggttcgtgatgaagaccaagccggaggacgacgagaagtgcgacgacctcacgatctacgaacgggctcaagaccttcaccgcaagcgccaggggttccacgacggggttgcgcgcaccttcgaggcccgcatcaagcgtctgatcaaggccggcatgccgaagacgatggtctgggagccatgattctggttgtacccgtggaagatctgctacctgtacttggtcgacgaatcaaccaagaaggacgatggtacgcgttacaccctggctggccagatcgcgatggccgaactcgaagaccccgaccggactcagtggactacctgtacggatgacgagcgtctggcgcacgtcccagccaagatcgtcaacaagatgctgctcccagagcacgagcgcgtcgacaactgggtctcgaccaaattctagtgaagtcatcccatccagcatccacagcggtcccggatgtagttcatatccgtagcgtaacactttcattccacaatcaccgttaatgtcttcgctgtcttcatcgtttccttcttcggtcgggttatccaggtcggttcaaccttgagcgcagtcttgttcatctcttctggctttggcacctccttcagggcgacatagtcaacttcatacactcgccgttgagaactccactctcgctcgggttactctccatagtcacaactccatcgtagatccgctccattcaaattcacaatcaattttccgtaattcacatattcacatccaggcatctccggcctccgtctgggaatctccaactgggatcaatactcccgactggggtcgccccattcggacttgaccactcccaactatcgtatgttagggtggtcgttcccagcctgcatggcttggaaccgcgctcgggctttcgcccgttgattgcactcatacaagagcgctccgcaattcagctgtgccatcggtatccatgcaggctcatcgtaccccttccatttgatgagatactctcgtgcccgtttggaggtccgcgtacgcttgttccacctgagatccctgatcttctccacttcgtactcgtcattctcgttgtccgcttcccagctgtcttcgggaaaacgacgtgttgagcgcgaacatgagtctctctgcgtggtcatcccagtcgctctggtcagcttctgcgacgtaagcccggatggatctcaccacagtctggacggaacgttcctgctgtccattcgcctggggtcggttatgccaacgtagctcgctatcggctacccagaagttccctgaaccgagtgaagacttcactcatgaacttgggatcctggtcgtgacgcagtagggaactggctccgaagcagcggaacgccctctcctcatacgcttccgcgacatcctgagcggtggtagaactcatcggtttgcacataacaaaacctgaaaacacgtcctggaacaggagcaagaacgtgttaccccgttcgaacttcggcaaatgggtcacaagtccatcgagaccacttcgaaaggctctctgggctcgatgttcctgggcgaaggtcctggattcggcggacggcccttgccactggcgcagtcggtgcactccttgacgtatctttcaacatctgcgtacatccccggccagtagaacaccagccggagtttctcgtgcgtccgggttattccctggtggccaccttggaaatcctcatgggcgtaatgcaacatgtccagacggagtgcttccggtacgactaggcgcaactcgtcggtcttgtcgcgaggttggtcccgattggacctgaccagtcgatagagtacgtcccgaacatccaacgcaaataggtctgcccgcttggacagcttgcgaatctccagccgggaaaagtcatccaggtcgcccttaaggatcttcttcaggttcaccaactcatgatcaacgtcctggtgtaccttgatccggcgccacctctcagcctgacactcaagcgggttcataaactcgccctggttggggtcctcacggctctggctacgagttattgcggccatgacccgggctaccattggcaggggggctgactccggccctggaccggcatcgtcgggcgccccagtcgtagattcctgactgggctcaccggggggatcgtcgctcagggccacttcaggcttcatgatctgttcgtggatccgagagactcgccccagatgttccatctcatccgggtcatcgatcgtgcaggactctccaagcgccagcgtcttggatgtcaagtaatctgcagcctggttgtactcccgcttgacatgtaccagccggatcgaggtgaacttttacttcatttcctggtactcagccagacgtcgctgcaggttcggctggttgccgttaatcagtccttgggcctggtggatgacgatccgagagtcttcgacgacaaccatatccgggatatcccggtcgtgaatcatcttcagcccattcaggaggccgaggtactcagcgtcattcaccgtaacatcatccaggatgaaaccccgcgcggccaggactttccagtcggggagctcccagatgatacacccacaatttcctcgcctcgtcgatgtcttcgcagctccgtcgaaactcaagacgtatccagcgaaattagcctccagcatctccacactgatcaccggtgggggtttcacttgacccttggccgggatgagcgactcagcaacctcgtccaggtgctcacgcggcgttatgccagcgcccaggatcgcggccaggccgtcttcgtcttgcttcaccttctgcacttccaagtcccaatgggatagtgttaacccccaccggacatgtcggccgtcggaggtcttggacttcaacagccaggacagtactgaatacctggtgtgcaccttgatcgggcaaccctggacgagagtgttaaacacatccagaactcgcatgacagcaactgcctccttctcggcgatgtggtatcgaatctccgcgtcgttcagtacgcgccccgtgaacctcacaggctggatcactccatattcctggccgagtaccgcgcaggcggcccagcggttagcatgcgggataatcacgaatggcttggtccggtcggggtgtcgcaacaggggtgtcgacacgatcttccgtttcaagatctcgaatgcctccttcgcccaggacaggtcccggccggactgcacttgatcctccgtgagctcaaacaggactgcagccacaatcgggaagtcctcaatgaacttgtgatagtagttaaggcttccgaggaatgactgaactcccttcagggtagacgggaacggcagatcctgaacacccttcgcaatcttcggagtcgcgcgcagtccttcggcactgatctcgtagggagatacgggatactcccgaactcactcttgggcaggctgacagagattttccaatagcgcaaccggaatagcagtgcattcaggccctcacacaactgatcccaggtgggcgccccatgcgcaatgtcatcgatgttggaactccgtccgaggacaggtcccatctaggacggcatcgggatattgcgttgaaacacagtcatctgctccaccaagacgggaacactagctccagccttctcccgttcggattcatcccggacggatgggtccaaaccgaggaactcgagtacatccgggtccacctgttcttcttcttcccgagggagacgcacgaaaccccaaaggcagttgttgatcaccgcctgatacacgagtggggcattcttgagtccaaatggcatgcgtacccactggaagtgtccgaatgggcagatgaacgcggagattagcttcgcacgttccgtcatccggaccgcccagaacccgctcgccatgtccagactcatgaaccacataacggcttcgaatccaatcaggagatcatcgatcaggggcaacgggtagctaaaacgccggatgaacccattaaccacccggtagtcgatgcacattcggatgtccacgccattcttcttgaggacgatcacaatcggggaagcccacggcgacagcgacatctcgattcgacccgtttccagcagcttattcaggagctcgtacaccttcatcatcaagtgaggggcaatggaccttggtcgttgagcaacgggtttggcgtcacccacatccaggtcacataccacacccctggccggggccggcgcagcattgccatccccaaggaagatcttgcggtgatacttgagtatagagcgcaacttctgttccccatccggggtagtccgcccgggttctccaacatcagccttgtcaatatcacactcggggctcaggtacttcagctcaggaagcaaggccaattcgtcacgcaactgggacaacaactcgctcccctcgtgcagatacactccagcttccaggtcgagctcctcctgattgattcgcatgcatcgattgtactcttcctccagctttcgcagcggggtactgggcatcgacgcagtgggtatgtcaggctcttcacggtcggagatatcctccgagcggtcaccatccaggtcggactcggccagatcacagatgctcaggttccactcaccagaactcggattggactcagctgtagtgccgacaccgctgtgagtatcttcgacggtcggacgtcgaccggattctgcttccttatcatctccatctgagacgccttcgacagatcccgcccgggactcagcgttaccctgctggagcatgaccagccggtccgtccgggatcccgattcaggccgtaggagaatcctggttggccattcacgctgtggtctttctacagctgggggctgccgactccactcgagctcgatctgctcttgctcccgtgcctctgcttccggagacattgtgttctcgtagatcagctgttgccactcctggtaccgcttgcttcccggccggacaaatcttccaaaccggagaaaatgcccgaactcgacgatccgggccacaggagtccggttgtcgatccacactctctgcttagggatattcaccaccttcactgaggatgcccacgacttggtagcatacaggatcttggtgacccaacgatcaccccggccggcccacacaacatcccgttgggggttgctctggccgtacctaaccttcacgatcgcatgttcccccggacggagatagatccgctcatccggggttaccggaagatccaagcccatgttgtcgcggcgcggaccgtcacacatcacaacagtttcttcgtccgggagctgcactagtccttctcgcacgctcaaccgcactcgagccgcatacatgaagttcattcccagaggtacttccaatccttcgccgatattcgccaacccgacactcatcacatacaccacacggaatcccagagtgattttcacccgggcgtacgacgtaatattcgtgggagcacctcctaatccggacaccctgatcggctccggcaacatccggaatttcagcttgggcctacgcgcaaggtccaagctaatcatgcttccagatgcaccagtgtccaagagtatcctcgttcggagatcgttcaccgccccatgcactgtcgccacttcatgactctcttcaggctcgtgatcctcccaccaaccgcatctctgtcaaggctgtaggatgacttcgacttggtcatcgccatccgggttttcccgtccaggattcgtacagttggggtcgtcaaactggtcctgaaatatagttgacatgcattggtggttatctggttttctccttctcaactcgggtccgacattaactaagacacacaatcctttgggtttcgccagcccggcgcgttctggatccccacccagcgggtttactagtttaacggcgaccccggattggcctcttcacccagcagttgcttgcgcaggggtggaggcacgtcttgcaacatccccttccgtgcgagtttcttcacggcttccaaggcgtcgtaatctccacaggttccttcatgaatcttgccacagcgtgagcacggcttcactcaacacgcgtatcccggatggcccttccggttgcaccggtcgcaaacgatctccgcccagcagttctgctccttgtgaccaaacttgaggcacttctcgcaaaactcgttccggtcagggttctcccgtctgggcgattgccatccgggccgaggtgattgccatcccggccggggcgactgccaccctgaacgggaattgctctgcgcaggcgggcgccacccactctgctcaatggccttgaaatggcttgacggagctcgggctccgggatctgagcgacgggtgggacagtcggtgccacctcagccggagtgtggtgtagggaacatcaagttttgtgtcacactctaaggccgcagtggaacaacgtaccaggagccaagttctactcggcgggatgaccgtccgccgagctcggtggccaagaatgcgctgatggaccgctgaactcggctgatggtgtcagaaactaaaggcacaccggccccgacctggtgacacgtggcagacccagtgatgaagacccagccgagttcaggaaggcactggacacgctcagcagagatcatggggggttcaagccgccgagctcaggctaaacggtaccatgtaccgtccgatacggtaaccaggctcaattgagtccgggagttgcgcagtcgagttcacgggtcgctccgccgagttcactgggttatccggcaccttatccggctcagccgagttcaaggggttatccggcttagccgagctcaagcgtcgccgagctcagtgaagagtcggccgagatccaaaaccgcccactttcatttggtatttgtataggagcttagaaatagtggaggtgccccttcagggcgcccgacagagataacaaacaacagagcagaattttctaggtccacaacacgtgcacgcgcttccagtaagcccctgcaagggccggattatgtctgctgtcagcacccgagaggcatagcttgtagggtgttgactggtagcgccaagagattaaggtcggcccgggttgggcgcgtgtctcgccaagcgcgaaggaaaagcgtcgccaccgctgcgagccggtgttcccgtacgtcccgggcactgattgctgagtcgagaagcctttgctctcggcgacccgtaaaagccctcgagggccgtcgtccgtcctttggcggagggcacgggatttctaattccggagtcaggtaactcagctggcttccgcgattgactggcttgtggtacttggtctctgcgaggacgagtcatcactgtcccggaagggccgagccgctgggggacatctcagcgcaggccaacaagggccgactagctcggctgttgttgtgtttgtagctagggtgtaacagggttacacgcacaagtggctacagtcacttgttactctaacagatgcgatgtctgttcgaggtttgaacacttcctcgaccttggtgtaaggtacaccaatggctacatacatttacgaccaccacgacgggtggtccatagagacttaggattcctattggctgagagcagcacttttagccaatgagcgacatgcatagcattggaattctgccaaccagccgttggcagattcctatcttagaatattacatgtagaggaagtcagaaacataaaacaaaaatagcagttctcattttaacccaaaaacattatttggatcgtttatttagattaatctatactcggaggcccgagtataattaactctaatttaaactaagctacgcttccttacatacacgcgcacacgtgtaagctaaagtagtgagccaaagtaggcccactacacctggtagcactttgtagtccgtccaacgaccgactacctgagttcgtacgtcaccgcacgaacgcggagctgagaaccttcccatgaatacggaggtgttcatggaaagctccactacgcctgcaactcacgttgcacgcgctgactgtccccacctgtcggacccagagtgggaagctctccaacgactgtcaacagttattggtgaggcggctgtagctacgatgctgcgtatgctaacgccgacagagcaacatggtgttgctctgggattcatcatgagggagcagcgagatgctgcttcgtctaccacggtggcgtcggggacgacaccgcgcgcgcaatcgctgaagctcagcgtgagcaattacgttggaagagagggcgagtgtggtatagcagtacacacaaaatcgtcagttgtggtaacttggctacaaacacaacaatagccgagctggtcggctttgttggcctgcgccgggttgcccccgagcggttcggcccaaccgggacagcgggtgtctcgcctctcgccgagacctgccaaccaagatcactcctccggagaaccgccaagttcgacggcctccgttcactcaaccctgtgccctccaccaaaggatggacgacggccctcgagggcttttacgggtcgccgagagcaaaggcttctcgactcagcaatcagtgcccgggacgtacgggaacaccggctcgcagcggtggcgagacttttccttcgcgcttggcgagacacgcgcccaacccgggccgaccttaatctcttggcgctgccagccgagtaccctacaagctatgcatctcgggtaccggcagcagacataatccggccccgtgcagggacttaccggaacgtgtacacgtgctttaggcctagaaaattctgctctgttgtttgttatctctgtcgggcgccctgaaggggcacctccactattcctaagctcctatacaaataccaaatgaagtgggcggttttggatctcggccgactcttcgctgagctcggcgacgcttgagctcggctggtccggatgaactatccggataattcttcgagctcggctgagccggataaggtgtccggataagctgctgagctcggctgagctcggctaccggtacagtgtaccactccagccgagttgttcgcgcgaaatctggtgtttcctacaccacaactgccccggtcatgttccgagccgagttggtgaggggcctgaccataactccttgagtcgagtccaatctcggccaaaactccaacggcagcgaacaagtctccgcgccatgtcgtcgtccgacgctcctgccgctcctccggtacgttcctcgcctccgacggctccattcattctgctgctgacccttcttctactgatcttcacagacttcagttgcgtcgtctttgcagtcttcacatcctcccgcgcgagatgaggggaagttcgctgagttggtcgactcggcgtcccgggctcgcggggtcagcgatgggcaggagcaccctgtcatcgatctgacaacttcccgtgggttcgaccgggagtccgagccggcatctcgcacttctcatcgccgcttgccgagtccgcgtggcgacaccacttcggacgccgccgaccttggtcggtcggactcggctgggccggtgagtctcgactctctcgctgcgctgatccatgcgcagtccgagcaacgccgcatcgagaacgcggacttggctcggctgttgtcgttcgtgatcactcgtcccgcgccggcggctgatagagaggtccgccgagctgccctcgaggcgacgtccgtcagctaacttgtgagcctccttcgcggtcagcgccaaccttcaagtcaagctagtgacgtcgctgcactgagggtcgagctggagtctgctcggactattaacgctgacttgactcggcggctggattcacaggcggctgtgaaggccgacctcgaggaacggttgaagactgtcgaggaggagcgtgaccgatggaaagccgagtcgaagaagtcgtcccctcttctgaccagcttccggaaggcgatggccgagtctgaagcttccttgaagtcggcccgcaagtctcaggatgataaagtgaagtcggctctcgctcacgctaaggatctcggcaggcagctcagagaacgcgactcggagattgagcgtttgactcagcttctttcggctcgtgacgccgagtacgctgtgctccaggggatctcgaccaagcacttcgagcaactgcaggagccggctgggttactcatttctggaaacgcccagcctctccgtgatgccaaggctaccatcaaacaccagcgtgaggtcatcctccgacagacgcgtgtcctttctcgcatgggtcttttacccatgcatgatcctcacatggctgctgcagctgcagccgggttggacgtgcctgggttgagccctgctgacttgcagcttaatgctcggttatgccggatcttggctcaacgtttcccggaggtgatggacatcccggctggagagactcgtcgagtcgagttgaccatccacccgcgagcggacggcgctgctactactctgccagcgcccgtgagctcggctggttctttccttggacaatcaacccggctgactgggtctgaggctccggcccctccaagcgagtctcccgcatcatctgccgccaatcctgtgtcggctggtgcggtttctacgcccgtgtccgcttctgcttcgcgccgtcgccgcagcaagtcggtcgaccaggttcaccgagctcggctggatactctgacacccgccgaaaaattacttcgctactcaaacccgaagtcagcgacggcggctggttctcagcgcaagcccaagaagccactcgagcagccgtacgcgtgtccacttcctggtgaggtcggccatgaggacgcgttggtccagcttgaaaaggctgcccaagagactgacgccgcatgcgacctatcgctccggtcgagcttgaacttagccgggttgactgtcgacgatgtgaatgtggaggccggcgacgaggttcactcgctggaagaggacctcttgttcgagttcaccgaagtgcctggttccgccgagcttccgagggggcccgccggcccgaccgtgagtgtaccgcccgtgtaactcgtgccttactcttcctccccggtgcagacgccttcaagcggagtggctgttgtatcgttgcctggatctgctgaccttgctgcaactccgtccgctttttctcttcctgcctcggttccgttcccgactcgtgtccagtgggttcctccctcgaccagcgtgccgagcgcggctgtggtgacatcgactgtcggcgccggaggacaaccgggttcctctgctcccgatccggtgcttgctacaacgcatgctgtgattgcgccgagctcgacggctggagtctcggctgcgggtacaattaacagctccgctgcgattccgcctcgggtttcgcagtcttctccgggttcggccgctcaccggctcttgacatgtactcgttcccggtttgccaatcaagcccagagtcgtcgtggcccgtcaggggtggcgtcgactgtagtcaccccaatgccgagcactccgtcggtggcctcgacccggccagcggttcctcctagctcagctgggatgacttcccatcgggtcgccctttacgctccactgcggctactgcccgagtgttgaacgctcactgcttggatctgttcgagactcctgactatctcgtcctccggtccgctcggtgtagctcttcctctggttcgtcgggctcggctcttggattgaaagctcctggaacctcagcacatccgttgtctgtgtccgagagctctgaatctgaggctgacgaccctggatctgctgacgagctcagttgggccgaccctgacgcatttcgccgggcttcgttagcttctgcgctcccacctccgcacgggaagatccagagctacatggctgctcgtcaatcgcctctcgttccgtccagcgagtcaggtgactcagactcacagccgagttccaagaagcagagcggtaagggcaagcgcaagcggaggcgcaagcacaagctcaagcacgggcataagcacaaacacaagtcgatgtcgaagtcgaagtcggcagggtcaaagaagtcgaagaggtctgcgtctccggactcggctaaggacccccgcccgtccaagcgtcagcgaggttggactggggactcggccgtcggtccggctgaggtttcggccgcttccagctcgactaacaactcggctgggagctctggcatcccatcgagctcggctgtttcgccgtcgcctatttctgctggtccagcttcaaccctgtcggtgcctatcgtgaccgctcatgacgctggcgcccacgttctccctcagtagcctgcagctttacgctattcgctcgctcagctgcgcactcgagctcgccaggcggtcggccgagatgcccggatcactccccagctagctcagctgcgtgacatccgcttcgttcattacgggtctcggcggtgctgggaggcaatcctcagtcatcaaacggccaaggtcactgtggatgacgcgtcggcgaagggtagtgtgccggttacgctctgttccctcgctgagattaaagcgttcgcggacgtctaccatccggatcacccggctcagcggctccttcgtctgcttcccaagactcctatcttcttctcccctcaagtcctcgacgatgccaagcgccggttgacgaactcggtgaagtcggtgaccttgatggagcgtctcgcagaagtattcgtgaagatccgcggagaggctccgaactcggtttgtgacaaagagggtcctaccaagttcttcgtagcactgttcgagcggtgtcactggatggtcgagtcgagtgtgctgatggggctacatccggcttttcacacggggctcccgtatcacgtgatagccgagatgtatgacacgtgggtgttgtacaagttggctcgcaagcgtcgaggcgatgccctccgaagtctcatgcctatcctgccggacgacctgttcactgcagtgatgaagcttctcggcgggcttgctgccccggaaatcgacgcggagctcttcttcgagccgtcggtcccgttgtatccgctggtcaatcttgcttggattcctgcgggcagagactggtgtgctgaagccgagtctatagacgactccgagcctcggcgagcttggtggttgaccgacccagcgacgcacccgtacaacacctgcttccggacgcgtaacttggaattcatggttttcgctcccgctggtgtggatccgcgcctagtcgaggatgctgtcgatgaagatgtggacctcgacgagcctgcgcctccccagatttcgtcaagtgctccgactccggtcaaccgtgcaggaatccacatcttccaaggttgtgaagctggtgagctcggctgggccgctggcgatgcggatccggcgtctccgttgatcgggtcgcctaacgtgtgctacccttctcccacggcttccctctttggttcggcgtcacctgggtctccagctgagtcgagcgcaggatcgagtgtccctctggctaacaactcggctattccggcttcaagctcagcggactcggctgtgcagactgcgggagcagcggatagctcggtcggctcagctacgaacactgaaggttcgattggtctcctcgcagcggctgctgctaccgtcgtgttctctgtcgcgcattcacagggtccttcgtcttcgtaacgtgcggctcagccgccgagctcttcttcctttcccagcattcttcggtgtaattcatgtaatgtatgcaatttgacgcagtagcttccttcgcctctgctgtcttcactgagttggcgggttcatcattttggcgcaatagctttaatcctcgtctgcaacttgcaccatttgcagacggttttcacgcttcttctgccgtaagtagtccccacacgacaaattcgacagcggctcccaggttggctcatcatagccgacccacttgaccttgaacttccgctgagttttggaggtgctcgtagagagcgacaactcgtcgtccaggatggcttcgacttcgtattcattcattgcttcgtcgggctcccagctatcttcaggaaggagtttctcgtcaacgtcgagacgatccgactcggctaagtcggctactagcctagttgtcgaccgctcgccgagtcccgtgaccgctttcagacgtgacacatgtatcacagggtagaaacggtatccgctcttgtccgggagttcgagctcgtaggcaaactcctccaccttcatcttcactcggaatggcccatgccatcgatgtgctaacttcttggtcaagccaggtctgactcgttccatgaacaaccaaacttggtcaccttccttgaatagtgacttcctcgactcggctaactcgtcaccttcctcagtcgactcggctgctccctcgggtgagttcgctggggtaaccgtcccttcctccccggctgggacagctctctgctcgactcggctgagtccgtcagtgtgttcctttgctctccgtttcttctccttcaactggaactcggccgcaagcttgaaagccacctctctctgtcagtttgcttctctgcgccattcggctagtgcttcggtcgctaaagagtcagcagccgagttgtagagacgcactacgtggaggtagcgaactgaattcagcttgctgaccaatttcgtgtggcgtgctaactcgacttgcaatgcctccttcttacacgcgatcacccccatggattgctggatcacaagccgggagtcgcccacgatgatcaaatccgtcaccccgcgctcaatggccgaggtcaccccattgttcatgccggtgtactcggctatattcaccgtggtcgatgggaggtgcgcgctcgcagcgatctcaatgttccagtctgacaaacgccacaggatccaagaacaactcccgaacccgccgtgtttagcagtcttcgccgatccgtcaaacgacaggacgtgtcccttgaagtctcggggtacatgcgtatacagcaattctgggtccatgcggaccacagccgagttcttggacggtggagtgacatgcgttagtagctcgtccaatcccactgccggcgtgatggacgcttggagcaactgggtgaaatccgtgtcccgttcgcggacccgcttgacctttaggtggaacggtgatagcagtaccgcaaagctgactgctctgccgtagagagacttcgactggaacacccattcgagagtcgagtagcgggtgtaaacatggatggtcttcccggcgagcaacgtgtggcagctgtagcaaggcgagaacttctttctcggcgggatggtagccgagttcattatccttaaggactcggccgcagaaccgcactggatggagcttcccgtcgtggagctgcatcagcgtgctactcagagcccactcattggcgaatagcataacctggacgtcctcagccgagttgaagtggcggagtacgggtgcgttgaccacctgctgttttagctcggcgaacgccgcttttgcggccgtcagatcaccgccgggtccgaaatcttcgtccttcagctgatagaggaccgccccatatacagccaggttctggatgaaccggccgtagtagttcagcgctcctaagaatgcttgcatccccttcttcgtcgtcgggaacggtagcccggctatcgccagcatcgttttctggtcggcttagattccagccgaggtcaccccatgtgacaggaagtcgactttaggttggacgaagatgcttttcgggaagctgacgctgatgcggcattcagtgaagcgttgcagcaatcggtcaagcgtccccaagcaatcgtcgaacgtcctcccaccgaagcagatatcgtccacaaacgatcgccggtcgaaaaccggtgcaaggcacgattcatcaggttcgcccgtccggaacatgtcggcttctgggctgttaatgaattcttccaatgggtcaaactcagcttgagctcggcggtcggcctcaaacttggtctggccactggcttcaaagtcgatgtcggctgcgagccgtttccgcggagcttctgaggcggcttccgcttgttggatgcgcttggcgaacaccttccagccgcccttgggttgtacgtaaccccacagaacgttatcaataaggcgctggtagatcattggggcattctttaatccgaagggcatccgcagccactcgaagtggccaatcacgcaaacaaaagccgagatccaacgcgcccgtcgagtcatcatgaccgcccagaaaccgctagcagcatccaaagagcagaaccataggtacgcttccaactccgtgaggtgatcgtccactagcagcatggcatactccatgagcaacgtaatcgcgtttaccagcttgtagtcgatacacaactgaatgtcgaccccattcttcgttaggacaatcacgatgggtgatgcccatgggctgttcgagaaggcaattagccgagcccgtaacagcgccttgagcagctcgtacaacttgccgagatgcttcagcggaactcggcgggctcgttggcggattggcggatgcccctgtacgtcgatgtcacacactacgccgtatgctggtggaggtaggacattaccactggagatcatgatcttttcatggttcttcaatacttccaccagccgagtagactgtggccgagtgtgcgccgagctccgaacgtttgacgcttcatagtcgagtggcgtcgacaccgcttcagtcagatcgggcaggaacgccaactcgcgagcatagtcttcgagctccaagttcgttgcttggtgctcgaactcggctgagtctcccgccgagtcgcctcgaccatctgtctcttcctcgtacttggctgccagaaggtaacgtaagcgcaggtcttcctccgggtctgacgacatgggctcgtcgctcacatcgacctcatcttcgagccttggactcggcggcttgggcccggggtcgttgatgatcgtccagtcagacaaatcgctggattgctcactttcacactcatctgctgcacaggcgttttggctgggcgcttcttgaccagccgtcactgtgatctctgctcgactaggcgggccattgaccaagtcagcagtaggctccgcgctcaatgctaattcctcaggcgctagggtagcggtagccgagttcgctggctctgtcagagtcgagggtggactatcggctgcttctgcctcggctcgctccttcgactcggctaacttctcccattgctgggcgcaagtcagtgccgaatcccgcggcttggtagacggccacgtagtcacccctttcggttcagggtagtttctacggtccacagctgacggctgtcgagccagccactcggcgtacagctgttgttccttttgcagcagatccttatccatagccgcttcgtaggccatgacttgccaatctttgtacttcgcggagtgcaacctgacgtaaccatcgggcggtaacaccccatgcggcgcccaggcaaccactgggaaatgtgctgggcaccacgtccaagtcggctctcgagattcaccggttcggtcgggccgtctgtgatgtagaggccgcccttcggttcatccgctgagttctgggacctcacgagaggtaggacaacttcatctggcaacttcgccaccgagttgtacagatccaggcggattccagccggaatcatgaagtccgtaccgagaatcaactcgactcctgcgtggtgatcgaggatccatacttcaaattcatacgtgacctcccagccgagcgtcacctttaccatcgctcgtgacatcgtcgccactttgcctttcccaataccttgaacgccaatctgttggtcctggcatgtgaaccgcttcaaccgcagcctcttcgcgaacccttcgcttattgccgacacattcgcaccggtgtcgagcaatatcttgtacgctggtcgttcactgctcccataacgagagctctcatccgaactcggcggtcaaacttttgtgacgaccaccagccgagtcgctccccagggagcagcttcataactctggtggctgtggtcacattcgtcgatcgctgagtcgcaactgcattgcacaatcttgcttggctttcttctccactctcgccgagctcaccatcaagtccatcgctttcacaatccaatacgtcgtcttctcctcggtcctcgggccttcctgcctcacccacaaaggcaaacacaaagttcgcctctactgctggctcagctgactgtgtcagcccggtatcatccaaccgagtcagtgttggcgggccgccgagtttaaatcactcggcgtgtagaggtcctggaggtcttcaggtaacttggacttgtcgacattggacttgacaaatgcggcgagcttctcatagcgctggaacagctcgcattgaccgacatcgtgcaattacttgcagaacttgcagcgacggcggcagtagtgaacggagtggttcgcaccaccgcaggcagcacaaggtccatacgaagggcgttcacgggagtcactgcgccgcccagtctggtcacgccgatcgtatcctcgactggcgcggtcagccgagctcggctgaccccttcggtgatcactccgtggtgtcccagctgagttccctcggtcccccgatctacgttcgcggtcgctggtgaacccggtgtcgatgtaatcgtcttccgagtctacagccgagtcggagtagctcggctggctgccgtcgctctgatcgctgtccgattcgtagaggttggatcgtcgattggattggcgtctctcagccagctcatacgggtagtcctccagcagcgctgtcgctagtcggcggtctcgaccatcgtcgcgtcggcttcgccggtcatcccggcggtcatctctgcgtcattcccggtggtcatctcggcgcggctcactccgccgagctgccgagtgccttggcgaatcggtgcgcttggcatctcggctgcggcttccgatgagacggtcgcgctgtttcttccggcgctcccccaggatcttctggttgatgatcttctcgaccttcttgatgtcggtgagctgttgcggatagagcagatccatgatgtcatcatctccgcagtgcaacaggaagtgttccgcatggtcagcagcatccgctccaccggcctcgtactggattttcgccgacttcgcatatcccttgagacgaacgaggaagtcacacaccagctcgttgtctttgcgctgagccgagtaatagcgagctcgtgccgactggtcaaactgcgaacagtagtagtcggcgaatgcctcactcagcagactccatttccgttgcgttttcttcgggagctggcgataccagctcttcgcgcctcgctccatcttcagcgagaatggctcgtaccagaggtcttgtgccagccgagttcctttcatctcgtagatgaaccgcttaagccactggagagagtcatccggtcggtaacatttgccttcgaacatagggatcttgtcgagggacgcatgggtgcaaacctccaagtattccgtccgatcactttcagcgtcatcgaagctaaggtgcttgatgacgtccttcaccgactcttcagccgagttcaggtactcgcgcccatcgtcgctgtcgctgagctcagctgcgtctgcagcgtcaaacaactcagcgtagcgtccacttggctgcttgccacgcgttggcgtcttcatatgcgaatcttcgaaatacggcgtaccctcagtagagcggaacacctcggctctcttgcgttcgggagtcttcggcaggggaatcctgctggggtcttcgacggtcttcggagtatcagccactcgtttcgcaatagtctgtcgagttccgacggcaccccgctcgagaccaaacgagactctcaaccgacgcttcaacttgaggatttcgcgtgaagctcggctggggtcccaatcgccgagtagcaggctgttgggccggctcgtgcacccgaaccccatcgccttgagtagcagcaccgtgtcttcgactagttggttgatgtcggtgctgttcaccggctgagtcagctcgggccctagcaccggccatctcgcctgagccatcgccactggggcaaacatcatcatccactcgctctgagctcgcatctcctctccgagcctgcccataaccttgttcgcacttggcgtatccgcattcctcgtcgctcgcgggatcaggggcggacgttccccttgagcggtggcttgatcttcgtcgtccgtatcattgccgagctcggccgccaggttgcgcacaactggacgtggggtacccattcgtccgacttgcagcgacaactcgtcgacttcgctgagtagcccggctttctcctcatactcatcctcaacatcttcctcactttcttggtcttgggcaacctcctcatcgaactggacggtgcgcgcctcgtccgccgtcgcgtccgtgatcatcgcattcgccgagtccgccgagttggtcagtccagccgagttacttccaaccgtcgctggactcggcgtaacaattcccttgaccatcttcacactctcttctcttcttctcaaaccttggttagctcgtacctacgaaacacaagcacacccctgttcccgggtcgcggcaccagttgtggtatagcagtgcacacaaagtcgtcagttgtggtaacttggctacaaacacaacaatagccgagctggtcggctttgttggcctgcgccgggttgcccccgagcggttcggcccaaccgggacagcgggtgtctcgcctcgcgccgagacctgccaaccaagatcactcctccggagaaccgccaagttcgacggcctccgttcactcaaccctgtgccctccaccaaaggatggacgacggcgcacggagcgcttttacaggtcgccgagagcaaaggcttctcgactcagcaatcagtgcccgggacgtacgggaacaccggctcgcagcggtggcgagactttccttcgcgcttggcgagactcgcgcccaacccgggccgaccttaatctcttggcgctgccagccgagtaccctacaagctatgcatctcgggtaccggcagcagacataacccggccccgtgcagggacttaccggaacgtgtacacgtgctttaggcctagaaaattctgctctgttgtttgttatctctgtcgggcgccctgaaggggcacctccactattcctaagctcctatacaaataccaaatgaaagtgggcggttttggatctcggccgactcttcgctgagctcggcaacgcttgagctcggctggtccggatgaactatccggataattcttcgagctcggctgagccggataaggtgtccggataagctgctgagctcggctgagctcggctaccggtacagtgtaccactccagccgagttggtcgcgcgaaatctggtgttctctacaccacagaggcggaaaagtatcgtcgagcacagcaggcattcggccgtatcagtggagagctcgcgcaggttccggacgaagtgtttgagtctgctatgagcgaccttgacaagtggtggtacaatctgaggcatggtaagacggatctcttgtcgaccccatcctctggtgacgatggctcaggcagtggtggtggtggtggtggtgggaacgatggtggcgctccgggtgggagtgcgtcccagggagagggcccgcaagaagatcatcacgatggcaatgccgaagaagggaacatgcaggacgaagacggatctgacgatgaggcaccgacgcaggtcgtcgattcgacaacccaagctgccgataatgaaggttgttcacgcgggctaagcgttcgactgtcaggcaatgtcagacggcaaggcagcccccctctcgaccgtgcagcgcagaaggaaaaggcaaaaaaggctttgaaggagtacaacaatggcacaaacctacgggctttattacgcgaaaaagatgtgtgtgaagtggtggctacacttcacgatgttaaacccggtgttcgtgagacagggtccttcctggctacgttgcaagtaaagtctcacgggcaaggcacacccattgagtggcgcgtcgacgctgaattcgtcccagacacagtccagtttcgtctactggagtctgtagttgacagcgcgctggagcaacttctcggcggccttgcgaagaacgaacagatcgagctagacagtgagggcgaagccgctgcaggcggcgattgttacgtggcggctattgctaaggtcggccagttcaggcgtgaccaagtggagtcgataaattggttgtggaacctacaagctacatgtcgtgatgctttaataggcaacccggagcgttgctccgggagggtacacagatcgacgaatagtttcatggacggataatagtttagtcaatcgtaaagttgttttgttttaatccttgaaagcactaccagcccaactctctagttgattctaacgtgggcatctactgcgtctgcttcgcagccgcagcatctgcccgagaatgcgtaattgaacaactagttgcgcacatcgaaatgtatcgatacggaaatgatgtttcagccaaacatttgtgaggctggtaaccaacaagccccgctcttctttatcgtggtgggttctcaggaaccgaaagtcaccaattgaggttgcctggtctgatgaggccatcggtgaccagctttgcgtaaataaaatttgcaataaaactattgatagcattggggtcaacaattacaattagaaaattggctgcaatgattttattgtattgtacaagacagttgacttgataactgtatgcgtgggtagccaatcaaatggtccatacagacccctatacaaaccacaagaatacaattcaatgcctacattgtacaattaaaattgtagcgtgacgacaaatctcaatcattttttcaatgtaaattgacgcaacgctgtcggtgacataacaccctggtcagcgtccaatggctgcgttggcaccagcaacgagagagctatttcattcattttgcagtgctcatttttgtacaatgttgtgtgctaacgataagacgagagagcaacagtagcggaacgaaggagagaggcatggtgcgctgatcttggcccttttttaacttgaggatgttagctaagtgacaataatgatcctcaattcaaaaacaaaacaaacaaacaaacttttaacttgagggcttggggagtaaattgcggaatgataaatacgctaatgggccaattccttggaagtggatgcttcaacgcagggaaaaaagtcttattcaaacgaacgatgctcgtgtcactgtcgagttgagctgattggtttggcgacagacacgaggttgggcatcttcggctaagagtgattgggtattgagcaaatggacatgtaaaaagtgcagcctgcacctagacaagtcacgttggtcatcttcagctaagcttggtccattatggcgcaaatggatacgccttcagtgaagccattaggtccgcaagtgttttaatgcaggttttggtaaataataaacgattagtatcaacctttggtaaataatgtgcataaatcttagcatttatcgacgggtacccgattccggcagatattagcttaaacattacaattaagaaagagatacccgatttggttcccggttttgggaagttacaagttttttgccggggccaagcacaggtcttcgacctgtgaatttgttgctcgtggcttcgccgcgaggtaagagctgctcatgcccctccctttccgtgtgccggtgcatttaccgagctattggagaactggccgtgcaatgaactgcgtggcttcggattcgacctgacgtactcggatctgtattgcttccgcgactcggcctggctaaatgatgacgcgcgaaggcatttgcggtggtgcttgctagctacaagaataatgtgacgattacggccacaccacaagggcatggtgaggctacacagcagaaacgaagtcgtaagggcctgctttcatccaacgcactggaggacgtcatttcaggttcaggtgattcgacgtatgcatttgtgctgctgcccgtcaatttcgggggcgctcactggggatgtctcgttgtcgacctagatgccaaacaagtgaagacgtacgacagcaaaaatggcaagcgcaataagcagaggttgaagaagatcgcgagtgagattattgctgcagatgcgactatgacgagctacacgactgtcgaggtgaccgagcctcgtcagtccgacagtgatagctgcggtgttttcgtgtgtcgcttcttctggacctgtgttagcgacgacgctccaagtgatgtaacgccgacgggtatcaccaagctacgctgggcaatgctggaagcaatcctgaagacgaatcgtcgctagttgcaagaagatgacggaggcatagtgcattttgaggctgaactcaatacatggacactacgtggatgacatctggacaacacctggagttacgtgatcgagccatacttgagtgatggcttcacttgccggttctcaccatgccgacgaagtcgacgcttatcactctggcttttgctcaagtagcgctcacatgagtataccaggtattgatacctgcacgaaacccggactctactgctcaagactgattggctagagctcttccgacacgagccgagcgccgtcacttccacttttgctcaagttctgcacccatgattcttccaggttttccacgcgcattatacctggtcaggtaatttatgtcggtcgcatagattactttcatcggattcggcagggtttcgaaaaacatgtagtaacctggaataaaacttgggcaatacctgtggaatcagttttctgagaaaaatctgaatctggcgctaaggctgttcaaaagaaaagtatgcaagcggttgctggtgctgatggcgaattcaaggcggtgaaggacaaaatggcgcaagatagtctagctgtggatttctactgcaggggcacgctactgtcttctcgatcttttttcgcctctcgtctctcagttcatgtttacgtatattcgtttaggagcgcagtatttattatccacacttacttccgtactccatgtgcgacgcccttgccctcatcctactgcgccgcgcccttatgccgtgcaaataatcactgatctcacaaaactcgacatgcgtggacatcttcctctgcaacaacgtacagtgtagtcttgccccgagtaatcgaggtggggagaacgatgaagcaggaaaccaagtgccgtataaggagaggcgagttaaaatttggtgagattaatgctaaacgaacaagttaataaaaatgtgcagttttcgctactctgtgacattcgcggcactgaagtttgcacaagtggggcgaggtgttgggatctacgggcaacactacatcaagggcggataaattgacgcgcggatgggattactgcagggaaaacttgctgcgtagtaatggatcgctctcgtcgtaccagcagagactcctggattcttgcaatatttccgacgcggtggacatttggtgcggaagcaaggcaacgggtctttacgcaggaggcgtgcccaactacactacggggtgttacgcatgtcgctgtggggaacacggtagtggcgctccaccaccacctactgcaccagcggcacccttgtggtagatgttatagcccgaaacataccacaggatactgtaaggtccgacctgcgcacctctctgaggcgcgtgcacggggttttcgccgattcaccgggacggtctctcctttccaggtgggatccgccacgcaataccatcattcggacgaagagagtcttgccaccttcctgggcaacctggttaaggagttaataccttcagccgaccagactaagacaatcgtgcaacgctggcggctgacctcccgccacagccgccggccaaagcaggagaacagacaccggtagaggtttccggccgctccgctgggccatcagttcacgtagctgcgtctccgggcaatacttctgcgcagcgttctatccctgatgacgctgagttcatggtcgtccagcgtcgatccaagacaggacaggcaaacaagggcaagaaagtgtcggggaagtccgtctcagcggtactgaagacgactgaggcgaccttaccaaagcgtccgccccacgagagcaaaaaaccgactggcaagtcggggacggccaaggctcgcacttcggcgaactccaaacagcctcggcctcgcaatgatcacgatgcttttaggctcttccaaaaagcacgtgaatttggccgctttgaagctctaatggaggaggacgcgaaatccgaggcagatatctactcggacggagaggatagcgcaccggatgacgctgcttttgctttccctgatgcaacggacgcggatgctccaactgcgggccaagcacatgatgtggatatggctgagtcttgcccggactgcgttggtcaccagagcgacggcaaggttggagaggtgcccacctcctctctggtgaacatcgcaccggcggtttcgctcacttcggcgaatcatcctattccccaggcagtttcgcctactacggtcctgcctgacatcagcagtgcagagcggcaacggagtgctcaacgtgcaagccggaggcagcgatcggaagtagagaccgaactgcagactgactacgtggagctcaagccttctcagccggggtcggccgacgtggatatggccgcccatcaggaggcctcacaggctggtttaatcatgtccagttacattgggtcgtcggctccgtcgcaggacccacctttcgcggccacgccagggtcagaagtgccatgctcgcttgcttcaaaccaatctaacttccgatcgagtgagcttgcccaagaggtcccagagtgcgcggtaagcagtcaacaatcggacgacagcgtggtctacattggtaccaagccacctagtcagaacccgatccaggcggattactggctttcctggtttcaagcgcgtgaagttcacgttccggaatccggtcagtgtgcgatgctggcactgtacgcgacgatttcgaattttcagggcaacaccctgaagtgcaccccggaaacaacagccgaggccaactatcacaagaaggcaatttacgtgctaatggtgtccaatctgccagctgacgcagcgcttggactggtcgatcccggggacatgcttgatcgcttatacccggactctcctcgtcagcccaccaaggaggcctcaacagcgctgctttgcactcatctacttcatgagcgcgcgcgctcggttgacgcatccgtccggagaacccactgggccgacgcttgtgtgttgcgctcatatgcgcagtatctccggcagccgctgctagtgattgatgtgaaagaaaacggagatggttctatgcaaatttacagctacgaacccatcgaagttcccccgtcctcaggtgtcactcgccacacacatgagcgcggattgtgtactgtagtcaatgcggtggacactagcgaataccttcgggtatgtggccgcctgcatgtgcttccggctttcctgttactacgtcatcatgagcaccacttttatggagttcaacatgaggatctttacctcagatggcacgctgaaggtgatcccgacttcgcggcggaaatggcgcacccgtaagactggttaccggactgcatggctcccctggagggcgtcacggttgttgtgtccgggattgcctctcgtacgtgtgtgggttttgaggtacatcaagctggacgctcaatcgatctgacggatgacaccgatgagaccaacgcgcttctgcatcgcagcctcacgatgagacaacgtctggatgtagcccacctacggatgaagtggcctattctagacgcccatagctatgatctggacgagctggaggagcgtgcaagggctgcggagaagcagatatttgcggctgcaggaatgaatgattgcgcgatcggggaacgcgccacggagggtttcgaggaaccgatgccgctgctacggcaccgggttctcttaagtgaccgactgcacgtcaaaccgtaccaagtaatcctcaatgcacgctcccgtgctgacttgacaccggcccacggtatcaagctacaggcggcgcaacaacacaacgacgccgcctttcggcattggttccgtctggagcacgcgcggctgcatgtggctgtggaggatattgcctcggcgagccttgcgcaggtgctaccccagctagccggtcagtctgaagcccttagatgggtttttgcagtattaccatacccggaactagcggccaagatgctgtcgcttggcatccttcggaactggggcaaagcagagatttatcgtgcccagctggatgcgatcaatcggataggggaggacaccaagttgtccaccgagttgcgcacgtactgtcgatcctgggtattggaggcgaatacagccaacgtggaggacaacagaagagtcgccgcagacgcaagcaggtgggctcacattagtaagtggctcactaacaagtacctacgagcgcaaccaaccgagatcagcgacgtggatttggaacttcttcacgtgttacctcatgtcatccggcattggagtaccacgccgatggggcgaacgcctctgggctcgctgggaaagtggtatggcagttatcctgccatccaagccatctgtgaggacattgctcagggaaaatggggaagtatcgtgatgcttccgctagggctgaaccgggaggagtgggtgattcccgccaaccgaaaataaaggcactttgtgccggacccccacggctgcagacaccatgcggcagtcgtgggatcctcctcgcgagaggagaagcatggattcgtcggaggagcggcaggacggcccgcccaggcctgttcggtccactcgttccgacagcaagcggttgaggcaacgtcaattgggagacttctttccaattgtagctggcgttgcaagagccaaacaggttcgaagtcgtttccgggatgagcgccagaagcaggtcacccagcgccgcgctgacgaacaagccttccttgaccagctccctggtttcggaggtgggctcaatgccgaggatcaaacctatgggggagtgactcagaatgtgaacggatttggtgccagagccagcgatcgcgatgcttggtttcgcagtttccgggcccaaggatctcatggtcggaacgatttctatctacttcaggaaactcatgtcgaagttggcgacatcgacaaatactcggacctgtatgcggctggctggggcttccgtacaggtgttgggtgtccgacgcgttctttctggtcgccgtcacgaaataaaacggcagaagtggcaatcctggtggatccgtatggaggtttcacggacgtgacaccgatccttgttgagcactggaacctgcacttcatggctgtccaaggccatctcaaggggcaacacctagtggtcgtgaatgtgtatgccccgcaccgggtgccgcaacgtgaagcactttttcgtcttcttgccggtatcgaattgccacatggagcactgattgcattggaggtgattttaattgtacgctggatgatgaggcagaccgcagctacgccagccgggctggtgcctatgactccgctgcactgaaagagctattagcgtcgtgggggatggtcgatccagttacagcagctcgccccacacaatggcggcaaggtgagctattgcggcatcgcgcggagacgcatacttaccgatatccggtggctggacatggagaggcttcgtcccgccttgatcggtggtacgtcaatgcgcacttgcacacgtgggtgtctggttgggagacagtacctcctggagttcacgccgagcattccggtgctaagctccacttcctgtctccggacgaccccatcagagtgcgcaagccgccgaaagtccaccctgttcccgcgtatgcagcagtcgccgttcaggaacgcacgcgatttttgctgcaggagtttttggggcgtattggggaagatggagtaactgcgcacgaaacggcaaagtggtgggatgagctgaagcgtcggatcgtcaaagacacgctctccattgctcgaactcagcgccgaaaatgccgcagtatcttcagccaaaaattgcgccgacttcgcaaacaacaacaccgtctacaggaggccatgcgaggtcaagaggcgaccattgacgccattacggacgggctcgatgcgctcacgttggaggatatgcatggttcttcgcccgcggttccgctgagacgagcgattgccgagtgtcaaagggcgcgctcctcgctgcaccaacgccgtcatttttcggcggcgacatactgggagggagagaccacacgtgagttttttcggcgagtatccagcaaatttatggataatacggtacctcgcctcgatcctgccgttaatggtcctgtacgtggtgttcacgacaaagcggacacgcggacgcctggcagcccattttgcaacaatcggcgatcgaccctaagttgcaagacacggtcgcgggatggatcgagaaaatcacaacagcgagcagagagcaagaagccacagtggcttcgatcacggcagcggaaattgagtgggctattgctgcttgcgaggaggggaaagcagcggggccagatcggctgggtaacagttggtaccgcatgtatgctactcagctagtgccgatttttgaagtgttgctcaatcaatggtacaaagctgggggttttcctgcttcgttcctggaggctaacattttttgtctcaagaaatcgggtgacccgcacaatgcactgaactaccgaccgatcgcgcttttgaatacggactacaaggtttttacgcgtatcctggcgatcagagtgagagcaacactggacgagcgtatccatggaaaccagaacggctttgctcctggcaggaccatccatgagactctgcacatctttgacgcagtacaacaagctctatctgatgatcctgagcaggacggggcactcgtgttgttcctcgacttcatgaaggcgtacgactcgctctcacggacttttttacttaaggcactgcggcagcatgggtaccctgagcagtttattgagacggtgagaattctccacgacgggaccacggcaagcttcctggccaacggatttcagtctcggcaggtcaaggtgcccagcggaatcaagcaaggctgctctctcgcaccacttcttttcatcttggcgctggaagcactgtatcaagaaatcgatcgtcacccagagctcaaaggagttctcctgcgatcaactggcggagaagtggaagtcagggtagcaggatatgctgacgacaccgcagtctatttggcctcggcggaaaaagtcgagacactgctgcaagtccccactgcttttggtgctgcctctggattaagcctcaatcacgataaaatcatggtgtttgcgttaagcaagtctgggctgccttcggatactcaactgcctgcgatactgaagttcgaagacacacagcatcaagaccgctatctgggcatttacgttggcagcgcccgtgaccccgaaaaaacgtggacgatcgcggaacgacagctttcaacgcgtcttgtaatggattgtcagaaaaccacgacagtagatcagagaagcttgatagcgtctgctattattgtgcctaagcttctctacataggacagcatgcatggccgtccactagtaccatcaatcgactgtccaagaaattgcggaactacgtctgacatgggtgttttacgaccgaacttcaggggggcagggcctggctggacgctgatctcgcgggcttgccacgcgcgcacgggggcctagcggtgccagatctcagggtcgagttgatggccatggcggcagtcacagtctcaaattgggcggtagtggggacacatacagctcatattgttggtgacatactgcttgccagagtgtcggcacctggcaccctggcccctgctacctacttgactccggcagtgggtttggcgccagcttcaggatttcagcgtcgtcactcaatgtgggctaccggccggatgctcattactgcggtcggaagggaccagggtgtagcaactagggcggacatggtatcctccctctaccagctcgcgtgtcatttcgatttggttaacctcacctgggacggaccgcgactagttttaggcgcggccgctgctctgagagctgcttcctgcaggcagattcttcaggacgaattcgcccagctcggacggcagtgcttagagtggcttccgtatgcgaccttggaggacctccgccttcacgacagcagtacaggggaaatggctcaccagaaggattttcgcaggctaaccaagcgtggtcggcctttcaaagaatatgttcactggtgctgccacggtgggggccggattactttcacgctgcttctcaggagaaaacggcggacttctgcagcgagatctcaactggagaagctggcattggtactcatcacgaattttccgagactactctaccttgggcctcgaagtgctgagctccagatcattgcaacgccccggaccatcctgccattgtcacagtcgtgccctcagtgcccccgcgtgtgcgtttgaatgcggactcgtcatcacgaagcaggatagtcaccagtcactcgcggttgatcaagcaagtggccgacctgttaagacccgccgtcagtgtcgtagatgtccagcctcacccacgagtctcgcgtatggtttgtctctgggtgggtaattggaggtggacacaatctcgcaaacactatcgtgatctcattgcggccgcttcccaacggcgaggatatgcaagtgctacccgtcggagggcacgctgggagcaagccagtgcaccagcggcgcaggggctatcgcaacttgaatgggcgaggcttcgacgcattgttggcctagggtcgtggggggaacaagtactgtaccggctcaaaaatcatgccttccctctttacgaccgtagcagacaacaactcggatgcccccatgcagcgtgcgtccggctggcgagggtagatttgcaccacatcttctgggtgtgttcggccgcagtatcactacgcaaagtcctcacgcaacgctggctagcaatgggtatgcctcgggcgcgtctcgaggagtcatgttttagcttactccttcctcaggtgcctgcgggtgtgtggacaatggtagagcacctcttccccagtctggagcgaagtacggttgaccagttaacggtggcggtgaccaagggaatggagagctgttggcgagtcggcgtggtgctctacttccacgctgtatggaggtggcgtgtggcgttctttgacccgctcaacacagtcacagaagactaccaccgggccttgttagtatccagactgcgccacgggtatgacactgtacatctatatctcggtcgaagtcttcagcgggatgttctcgagatggcggcccggacgatgcgtcgtgtgctcatatccgcgtgggagccgacgctcgacgcggcccctactggacggacccgctaccttttgtttttcgatggcggctcgcgtggtattcccggccctggcggtagtggtgctgcagtggtccgcatcggaaacggacggggtggtcatgagatctgttgggtcattagcatgtcctacgcggcggccagcacgaccaacaacgtggcggagaacatggggctactgacggggctcaaggcgtgccttcattttggctggaccccacttcatgtggtaggagacagcaacctcatcattcatcagcagaagatgcggactccgcctcgagctaagcacctacaaccgctgtattggcaaagccggcggctggcagacaaactggcggtaacgacgtggcagcaccacttgcgtgctcacaacagaatggcggacgccctcgccaacatggcgatggactcccgccgcagttttcaaaagatacccactcgaatttgcggctccggctcgacgtgggacgacgtgtacaactacgcttccggcgacgtaggtcactggatggagcagaacagtgctcggagttcgtggccttcacccgttaatgtgtggaggtggctctggcgttagttagggccgtttcatagggcggtctgttagagacgaccaccgacaagaccatagctgtcgttagccaaagaagttaagtgacatcaatgtacctcactgcgaaacgaaacgaaggcaacgggtctcccaacgaatgcaacgtcactattctcaccagtttcgacaaatctcgaggtgtatcaagcgttgaagacggggctgcccaagcgcgtgaggtcggtgtcgattagtgtggggctggcacttgtttgcatgacgttgacgtacatcctcgagtgttttcataaggacagaagcgaaaacgctgatggggactttatgccaatggagcagggcagaatgatgcaagaaatgtcattctagctgcgtagagcttattcacatgcatcaacttttacaacagcctgagttatagtaattttgaagtttttttcttaacccctcaatacgatgtacgcagacttgagattatgcgggcgaggcttggtagtcgagtgttggttaggaaggaaatccgaaagtgaattagaatgagttaggccaaactaactatcatatccttgtctcctatgcttaaacatgaatcgcaccaacgcatacctcctacttcgtcgtaggagaggcgggggagcaaaaagtaaatgttgcagatcgtatccagaaaggcaacttcaacttgcctttctctcagccaatcagaagtgtcaaatataggggctcctccaatcagatcccagtattccaccacgtgtaccacaattgcctatctttggcaacaacttcacagcaagcacgtgcctcgatacggagacacacaactagactgcgacgtgtacaatcgcaacacgcaggtcagtcttgttgagcgtacttgaagatgagctgggcagcgaagtactataaaagctgtcagaagtaattggggggctgtttttctttctgaacaatattgacaataagtagaggatattgatgaccctgcagcgggtacaatacaatattcggggtacccggactggaggtccggggcgctcgcagttctcaggagcgataagataccgatatggagttccgaaagcacggacacacccgcccaaaccattctacgagggttttctaaaccagctaagtacaactacttgacacacagctgcggctcagggaaggctgacatagcaggattttgaaaatacgagtacttcgaggtactttttttattgtttgagttaccggtatctcttgcgccagcttcgcaaccatagcatttgtcccggacgtaacagtgaaaattaaataaacaataaattcactattgctgcactaaatgttcaactagtgaacgccgccttggggggtgggttgagggggccaccggctcgaggcctcgctgacaacgatgatggaatggcgttcacagaatccgggcatctcccgcacgagcactatgggcagaggctcactggcatttgaaggcacattgaagtggaaatgttgcgcgaaagccaggagaatgtcgttcgataacacacgcgtctgccgcctaacgaactgcgaattgatccccaacaatattgcaattctaccaaagatatttttttcattctcggacgcctggctggcagcggctgacacgcgacaacaagaagcgcatcaatcgctgctacttcattgtcgcgggatttcgtctgcagattcggcgactttgccaacccagcactcatttcgtcgaatatgtgtgggatttatggtgaataatttcagtgtatctaggtacacacagtttttattttactgggataggaagcaacgttagtgctgctgtcgcagaccaaataggattatatccgtggtacgtcaagtcaaacgatgacccttcctgacatctaactggtatattttcttgaaaccggtacaactccggtgcgtgggcagatcgaaccggtgtgctaccgacgacactagtatgaatcagtacacatattgagctgggtacggatggacgaagtgaagcaaagagaacgattgaggcggactgtacaataacatgcattttctacaaactgcaaacagatctcaaccaagtaaaactgtagatgcaagatatcaaccgacaatgttttacaaaattaaaatgcaaacaggaaaatttgcggatagatgctttggctgcgaagcaggcgcaggagacgaccgtagctaataagaaaagcaattgataaaaataaaaaataaaaagaaggggtttatactaaatcctcagtcccagccttcgcggagccctcgttacgtaaatgaaggtttcttccaggaaaacgaaaaacatgccgcacatttctctccaatggagtctcaattcgaagacaacctctatttttgttattaactgtccataggcggttttcttctgctgtaccgtgttcgagctttaagaaagcatcgagacgataaagtgtatcgtgacctcctttaggggctgttgtggggcgagcttgaagtcttggctacttgaaacacgacgcttagccatacatacgcctgaacgccgcgtagagctcaaagaggctagggggcacttccgtggagacgtcgtccgcggtatatccatggtttttccattttttgaaggatttgaagcggtagagctcgtcatccttcattctcgttagcctgttcgcagataacaaaccccatttcctctcttcgttgtcgagttcggctttatcaaccgccgtttggtgacgtcgaagaaatcgcttgtcctcgctggcgacatcatgcgaggagtgaactccgtccgcggtcgacacaccgatttgatcggcctgtgacactgatggacaacttgcaaggaggacggccgctagaaccacaagcgtcgtgttgaagagacgcatgactggatgctggttgttgggtcttcaggcctggagaagaatttgcagaatgagatacccggtagttgacgtcgcccaccgcaggcttagggaacggttggtgcgcggtattttcgtgcggtgtaaggtacaatcccaacaacaatcctgcactgagcttgcatcccgacacgagcgttcacgtacagtgcatgcagtaaacgtgtgcggatcgtaccataccgcacatcttgctgtgtgcttaccgggaagtattaaccccttggacgcggagggttggaaaatcacctgatgctgttcagaacagcataagaatcacttggtttcattatgtctcgaaatccgcaaaatatgttctcgtcctttcccagaaatcgaaagaaactgattggtccacgtgttcaaaaggagacaaacgattatttagtaaaacatatgctttgaactaccgcgtgcaagggcgggcaaatgttttcggataaaccatatttaggttcccggggcgctgcagaagaagaagatgatgatgcgacttccgacgaagggtcgacgacgggcggcccctaccaacaaaagcgagtgcgcacggctagaatcaaggacacaccctttgcttactccgcgatgctagccgtgttgccgccttctagcaaaaccattcattctcggatttcgccgcgtaggactcaagtacagacaacgacttacaaagccggcatgcttaattccatcctcctatataaaaacaacgataaattccctcccgtcaaatctgtaaaactgtcataaaacacacggtgtgttgcatgaagtacacaagaaagcatataaagtacacaaaaccagatggtatacaaagatgaagtcatttgattggatctgattggctggtttgctcatgttaagctttgcttgacttcgtctgccggctttttgtgtctgccggctttgtaagtcgttgtctgtatggcatacgccatggacttccgcgcgatttggccgctacttcggaaggaaggatggtcctggaagccggcaaccgggatccagattcagtaagttgattacttataggtcctgcatggtgccgtacctaatgcgtctacctttgcagccacaactacatcaagccgggctgcaaactgaaaggagggacgcgaggcgtggacttcttcaacggcgaggacgagctgctcgcttacatccgctcagacacggaactatgcgagcggcttagtattatgtccggccgccgagccaagcaagtacgtacagcacggaaaatgattttgttatgagcatttcatgctaacactactcattctgcagttcaaagtacacttccaggcaaagctccggcgccgccaaagcgtcctccgacgcccatatccgtgactgaagcgagtccaccagcaaaacgagcgaattctgcatcaaagcgaaccgccaaaaccccgcgtacttccaaggtcaagtctaagcaaccctccaagaagcagatggctcaagaagcggacaaacggcgaaaggaactggcagcttttgacaaagtgtggggtgaacagaacgctacaggtaagcaatatactggctgctcaattgctctcatagaactgacgtggttttggttgtttagttgcggatggaaacgcagttgtgccgcctgtccaagcagcagtctcaacttcagcttctttggcgagcggtcagcctctcccgaaaggtatatagttttgctgctatgctgacatatagaatgctgacaggggatgtttactcattttagaatatgctgacaggaacaccagcgccgatcctaatgccgacaagaactgcacaacagctgaagataaagctgacattgatgcaaatgctgacggggaagccccagctaatgctaacacggaagcaccatcgaatgccaacacgggtcaggagaacgcaacgtcggaaactattgccggcaaggacagaccgcccccagcttctgacagcgcagcggtatatactaatcctgagctgcgtgatctctccgatgccagtccacgacacggacactctgtttccgaagaacaagcgtacgaaccgagtgaggaagaagacaatgatgaaaaagatgacgtctctgaagttcctgcggatttcaacgaccaagaaggagaagatgaaacaaaagatgccaaggaccccagaaacgacgaaaaccgagccctgcgcgacgccgcgtgcggaacgccgctgcgctttgactttgtggactcacttgacccgaatattattggagacaccaaggagaccgctcttgagaccgatggcgaggggggcgaggattccgctggtgatatcggcgacggcgttgctgacaccgacagcgatgaagacgacgatgctttggcgcgcgaggactatcttcgtcaggagctgagccgagtaacggggctaatggatgcagcagagctggaacggttgcacttgcgtgttcaaggtgagttatactttagattttactaacctgacgtgaacggtttctaactcacatgttatgctgacagggtcgtcggaggtttacgatgacgaccagctcaaccaaatgaaaatagacggatgggacgtgctgcctgagaatatggaggctccggtcgtagatgatcctgacgtggacaaaatgtactctggatattgtgggccatctcaagacatcctgacagtttctaagtcgccgctgggcctcttctattactttttgccgaaggctttctggcgtgacgttgctagccagacccacctgtattggaagcaaacgctggaagccagactcgacaaggcggaagcgaaggaacgcaaggttacgctcgtgcacagcgcagtagagatacattgcggcgaaaccttgaaaaatttaagaagattgctccccacgaaaatggtcaatggattggcatgatgattgcacatgcattgagtccctgcaagcgaatggaagatcactggagcaccaaagccacgggtgtacttccgatgggaacattcagcaaagtgatgcggcgcgacaggttccgtgatatcttgcggtttctacatttcaccgataacaagagccctgcagctgctaccgatcgagcttggaaaatacgatctgtgctctctacgctggagaagacgttcaaggaaggctacgttcttgggtcgcgtgttgccatcgatgaagggattcttccttcccacaactagcgaaatccgacaaggactttcatgaaggataagcctcatcgctggggctcgaagggtgtgatgacttgctgcgctgagaccgggtattgcaagaggtacgtgtgtgttgacatggtcggttttttatttggattttatgctgacgaagtctgtatacgatgctgacgctcaaaatagagtcgaacttgatattggacgcgctggtgacacggagtgttcgcaggccatggacacgaaaattggtcctgctgctgtcatccgaatcgttgcgtgcgtgtttcggggccttccatacggaggacggcggctgattattggtgatcgatactacacttccatcccgctggtccaacagctacgcacgatgggcttcaactacgtgggcactatgcaaacggatcgcaagggctggtgcgatcgtctgaattatccgaagaagaaacgccaagcgaggaccccacggggcacattccaaatggcagtggcgaagtcaaaccctggtttggtggcagtgatgtgggcggacaacaccatcgtctacttcctagcttcccaagtgacaactgcagcaaccactgtccggcgccgcgagaggcgtgggggcgcaagcgatgttccctgtccaggcctagtagctgaataccaacgctacatgggaggtgtggatcggcatgaccaactgcggctacaagcatactcgttgcagttgtccacaaggtacggataacattatgctgacatgatgtggtttctaatcgtaagttatgctgttcggatactacaggttcgccaagtacaagagtctattcctcggtcttgtcgacatggccctagtcaacgcctacatcgtctacaaaaaactatgtgagagaaagccccacaaggctcgcacttcaacttcatggcaaagcttcacaaggatttaatcgaacacacagaagcctgctttacgcactcaagagcagcgccaaacgtggcagcagagactccgagcgtcgtgcagggtgaacacaagctcacgcagaccactgactaccgcatgaacaatggtgttcagcgcctccgccaaagacagtgtaaggtatgctcctgctacaagcctgaaggaaagaagcggggaggaacgtcttcctactactgcgccccgtgctcacaaggaaagaaaggacccatcacgctttgcaacaaggagcgtggtcaccccaacaatgaaggtctcacctgtactcagatctggcacctcgtgtggcaaaacggtgagtttgcacccaagacaagccacatccgcgaccgtgcagtagcgaaggagtagccgttatgctacaatacatgtagattcatcttgcgacgcagtgggttagttgtaaaccatttacaggacgcgtagttagcgaggccgcgggtgctgcatcccctggacgtcttcggcagaagctctactggttcctctccccgtaattcaaaagtatcaggattgcgtgacttcgtgcaattggctgtgatcgggtcacacaaatatccggaagtgcccatcatccttgcgagaattattacccgaaaggttagctataatctgtgcgaaaaacgtccaaatttgttcttctacccggtatggtatacggaaacacatattatttcttatgctgtccgggacggtttaagcgttttttaatgccgtccatgtcacccctccgcgtccaaggggttaatactctacgtctgtaattgtcacaatgacgatgattgggtatcttcgcatgatggatacgctgaatctgctgctgtatcggtctctgtcgtcgccggtaaaggtcgaaatgacgactcaagttgtacgcaagtcgagaaccgtgatgatactgctgacgagggattagtgtacgcaattgtggatcgcatgccggtacggcttgcgttttggtacagggtccagtggcgagatgagcctgatggataccggtgggccgactcatggctgcccaggaagcgtttgctggaggacggctttgagaaagcatgtgcggtcgtggacatgtggaaagcgtctaagtacgcgtcgttttacgagttttgccgaaggaatggacacgtgcacaatatcggtgcctcgccgtcagcgaatggaaaatgtgcagttgttgctgtggagactgcagttacgcttctcggtaactctggttgggcaccccccgggtgctttggtgcatttgtggagtactgcgaccagcggggtcgacccttgtcgcctgacggcctgaccactcgagagcttcgtttctacatcaaatacctgaatgatcggtgtggtagttcgaagacaagtcagatcagcatccgcgtattcggtgacaatttgctaggaggtgtcaacggcaagaacgcgtcggaagtattgttgaaatgcgctctagcggatggagtttacgtgtgcgctgcctacagctcactactgctttgcgatcaaagttttgagtggtgataagctcatttacgatgacaacaatgttgcggtggaaattcaagcctatgacgcagagtggatcatggggattatctttttgcgccgaatcgcgctatacctcccttagtatttttggctgacagcgtcttcgtcttaggtattacctcgattggcttagccacaatatgcattacggtaagactgagagtttttaaatgaagccttgggtttgttacttactcgtgtcttattaccacgctgttagtcaggtcagactgcaacaagcgttcattctacaaaatccttgaaccaacccagaagatcgtagcacaccactcagtatgagggcacacaacgcagtatggatcttcgcggcagcggtggggaatcgatacgcgcgttggtatgcaagctttcgtcaaactctacctgaattggagcggcgtacgcgtgacacaaccttcttgtgtggccgtggcggtgataaaattcgggacgcttggcgtgacattgggccggaggaacgcgcacgtctaatctaagcaacgccggattccagtttccccaatgatacgtacgacaccatggaggaacgtaaggcttacccaggacaacgaaagaagacgtctggcacaacatcgcccaagaccactacggccaagaagactacggccaagatggccaccgccaaaacgactacggccaagacgactacggccaagaagactgtggtcacaacgtctactgccacaacgactacgggcaagatgactacggccaagacgaagcggcaacacgttcaaccgacttccaggaacaatccaaaacgtgttcgatacagcagtcgagtgactgatgagccgatgccaacccagcctgtacagcatgatactcagctgcaaacacgattcgcagagatggagcgcgcgcgtaacaactactacacagtgctgagcaaagagcaggatctccgaatccacgcagcttacaatggcgggagtatggtcggtattatcgaagctactgtggccggtgcgcagaacgcggtcgtcttggccagaatcaaggacaaacctaagacagtggaggacgcgttttccgccgtcgcacttcgcctggacgatgtactggcggttctaatgggaaccgctcagttcgaaccggaccctgagtacgatcaacccgatccaaggtttgctgcggcgcggattagacgcgcaaaacgaagatatgatgataccaaaagcgccctgtacaagctttgtgttgagcttggagcggatgaacctggtgagatcgtcatcgggaatcgtacgagccgattctttgggagagtttaagtgcatcgaaactttttgtgaggaagcgatttaggctgtgggtatcgtcgatttccacagcgataaagcaaagaatacatgtattcaatcacctagagggtttgacctagtcagtgttctctattctaatagaatgtcttgaactgtcagcgttggtgctgcatgagcaggccttccaacgggccctgggagaccttcagagctgggagctgaggatgtactgatcgtctgcttcgttttcagctagatgcttttcccttcgacttttttggtttggattgcttacgcttggatccggaacgttttgccttggcctttgctacgattctgtttttcaacttcgccagtgggtcgcgtacactactgatgttaaatttccggagaaccgctacaacatgccagcacatcagcattttcgaaaagtaggtacaggtgctgtgatgtcaactagccacccatcggaaggcattcctatgcgatgcgaacgccgtagagaccatgatgtggcttgctcgaaaagccttttccaattcgtgaccgtgtcgtcgtcctcttgtccatctgaatccagtcttggctgggatatcgctcgccgacgagctatcggacgaatctgatgttgggttgtcttacgtggatgtcaatgatagaaacaaagccaattggctgctcggtcctgttgccgtatcgagggagccgcattgactgtctccagaagaaatccgttttcttcttcagcttgttggtctgtgtcggcgcgtagaatctcgaggactcgtacttggttcgcatcgcttgtcctggtgataacaactcgagaagcttcaagcatagctgccgctgccttcactaactcagatgttggtgtggatgtatattctgctggcgcgggcttgacgggactcgtcgtttcgatgaaggtcccgattttttcgagtaatcgacacatatgatgattacggcgctgcagaaaatgctttagtcctccatttaggttctcgcagggattgttggttaatgcgtagccctcaggattgtggtacagttgcgatcgccaatagcggcctgttagccactgctgctcgaagtagtccgcgaattcaacgagatgtgtctgcttgcgccaattagctatttctcgatctcgtgtacgctcgaactccaacaagctttgcgtaaaatgcatgtcgacaatcgagctcatcacatttctcctttcatcaaagggcaggtgctgtgtgcgtttacgtacattgtacataacgtgaaaataacacatcagcttcgtagcatttgcaacactgggcacgttctcgagagccaagaattgagcatcctcagcatcgctcatggttgcatcgatacgaagtgttgcccctcgaacatgccgaacgacgtcagcaaaactgcgcaagcactcggtgtattcatgttccgtgcgccgactcaccacgaaaaaacccaacttggtatgaacgccctcggtccgtgaagccgcaagttatcactggatagcccaagtcgctaaccttaaacgtggcatccgcatggaactgcacaaaatcacccgagtggcagaaccgtaggcagctatcgataaatgcgagagacgtcaccccaataatgaaaggatcgtcgtcctcgccggaccccacataaacaaagccatccgtgtccaacttaggtccaaacagaaaagcggaatctggctgaagttctggtttgtagcggcgaacgcgagccatttcatgcacggccttgattgaatttttggcgcccttcgaacgccggtgaactttcagcgcattttgaatctgggagagctttggccatccgcctttagatggcttgatatttgcttgcttcttgagatgtgccagaataatacgtggggcgttcccaatctcatcttatgccgcgataaatgctttgtggtggagtccctcagataaaaactaataaactcccacacgtgtcctgccacgcaactacgggggggttacccctgcaagccaaatacccaaagacaacgagaactagtcccgagatctctaggcctcaccttgtgtacccttgtagcaagactcggatctttatctagcgtaattcctagaagacgtgtaatatgaaggggtgaatatggggttccttacactcgcaggcagagacttaggttaactctgccgcggatgcacttgtacagcgaggtaactcttcccactgtacgacaacttgttgtacaatatgtacgagatctactggagatctcctgccgcagctagtctgcgggtccaaaccaaagtgcgagacgcacaccaataccttactaaaccgtttagagtgtcctactgtcgaacactgagagctgatctcctgagtccagacaatgcaacacactacgctactagaaggttaccggggaggccaaatcaatccagaaccccgagtacacttcacaagtaggtaggaaacagtacgtaggcgctaaccgcacaacacaaagactaatatgaagaagtaccttgtctcgttgttggaaattctgaactgaactgcctatctaccggcggctcgtctgccggccaaccaaccaaccagtatcctgcacgcctttacctcatgacgtcatctgctgtctccgtgcggtgtcatcgtccttgttacgggcctccccgttctggatctccgtaaatacgccatcgggtttcgtaatcagtcgccggccttctatacgggacgccgagctagggtgtcccataattcaagtggctcaccttcgggtaacctccgggtccatcgcctcacaatccttcaacccgcattacgacatccgccctctcttcgcgtgaggctatcgagcaggtggctgccacgcgtagaactcctgcaccatgtctgcttctccacccacgtcgtcgccttcgtcgtcggccgccggcgtccctcggctgagtgctgccccgtcgtcaagctacagccacggagattgcaccgcctgtcactcccttgatcgatctataccgaccgcggctccatactccggttcgcagccatttctatcggaacgcgcgcgcattatccaggctgctcaagtcaccgcggccctcaagcacgaggtgctggatctccggggccgtcttgacgtcgcccaggatcttcttgaagcatctggtcgccacactgcaagtcttcatcgatccatccatgatcgcgatctggaggttcaacgcgtgcgcaacgaagccgacggtcgtctccgagatctccagcaggccctgaacacggaagtagaacgccgtcagcaagccgaagctgctgaacaacaagtacgcgcagatctcgcacgggtcgccgctcgctcagctgatgccgatgaagtcactccgtccgctgcagcatcgccctctaacgtcgtccccagtcagttggagatcgccctcggagatctggatgatcgagccggcagatatcaaggctacctggacccctcatcggtgaccccaggtggccgactgttggctgccagcgaagctgccactgatgatgatcggactagtgacggacgcgcgggacgtgccctgcaacgatccaatgccgaacgagacagatctcgcaatcaattgcgccaagcggaggcgacaatcgacaggttgcagaccgagttggcgcaatcgcgcacgctggtcaacaaagcagcgccacggatggacgcccttcgcttggatgcgtccaaagctcgtgaggacgcagaagcagcacgccgagaagcggcggcggcgtcgaagaaggcgcaaggcggtggtaagtcgccccaagtgctgaggttgttgatgttgcatcactaacgccttgatatccacagcgacagcgttatcagatctcgcacagcggcataaggtggctgggaagcgactggtggagttggagaggaagatcactcggctgactcagcataacaccgttctacggcgtgagaacgtcgtagtttggagcatcgtcaggctgatctcgcaacagctcaggatcgcgcagtggctgcaggtcatgatcgcgcgtgctaatgtggcgggttgactcttgtgctgacctgtgcgtttattgctttgtagaacgagagcgagcggaggcctccatcgctcgcgacgacttgcaggcggagctggatgcgagtcgacagtcgctgctgaaggagcaggcttcttctgctgatctccgcagcaaactagcggagcgtgaggaacaccttggagcgttgcgcaacttgatcaatctggtacctgcgccgactccgcaacctgaggtggaacgatgcgtggcgtcggcctcttccagttcgtctcttgccgcactggcgtcaacggccacgagccttgtctcctctgatcctccagcgcgaacatcttcgcagcagctcccgtctggctcggcaaagcgaagtggagatatctcttctgatccaacgtcacagtcgaagcgcgcaaagcgcgccgttgcgactaccgagggagcgccagctgagttgtcttcctctacggcgatgggtacgtagctcctcctcattgtcagacaagcgactttcatagatctccgtctgacagcccgtggatctccgtatcagcccgaagcccattcacgcacgcaattccacctgagtccagcgaagctgcgcgccctgccgatgtcacgccgtggctgtgggaggttgttgcaggtcaccgccttgaccagcttacagccaaagacctcgcttcgaagttcttaccatgctacccgccggggtgtgcaaccctaagaagggggagctggccgttcctgctgactatcggccctggccacaagtctcggtcgaagctttatgcaaagcgagtccctggaagatcttcctggataacatgcccgacccagtctcgttcgacattggagatccccgcttccaacctcttctggccatcatccgcgatgtgctggctcggaacgataatcgtggcgcgcttgtgttctgggagatcacccactccattgagatttccatttccaaggccagcgctgagttttgggaggtgaagttcacttcggatcgtaagaatcggagatcccactttgtgaagatgctgctgcctgtgttcgaagaggtggcccgcctgtgcaaggctcatgtgtgcgacttggacattcttctggagccattcttcctgccgctgatcgaaacgtgcccgtggttccctaagggagcttctggtgcctctggagatctgttacacgtcttacgaacgactgacgatgcggagccgtggcgcctgttctactggaacgctcgtgccaaacacccatcgatgaacgaacccatccacacgcgccttcgaggcaagttcaaggcgacctcgtcaatcgcctagcctgagtcagctgaacagacctaggaggacccccggaaatctccaacgtccgacatttcttccttcaccaatgtacgtagctagtgggtagtctcctcgagcatgcatcttctttatcgacatcgtaatacaccggcttcgactccatttcatatcactcccgccccacaacttaattgaacacagtcaatgtcatgactgggagatctccccaactggagatgtgaaggcatgtcgtaggtcgccgtgcattctgggaagtgatttgtggtgatcaaggtcatagcacaaactccaggcgtaggactgcacttagtccgacggccactgaccacgccttcacgccctcggtgtctcctgcactgcggctccgggctggatctccaagtcggcgatgacagcgatccggccaaaatcgacggaacgcgaaggtagtctccgacacgaacggtgccggttttcaccatcgcacaggcccagagcgtcgtggcgagcgcgtttcagcagccgtcggacgcgcgttcgcaccccaggtgcctccagcactgcgacaccgggctggatctccaagtcgcccccgagtactcgttcgtcgaaattctgatgtccgaccagatcatcacaactaacctcgtttctccattccatcgcgcgatcttctctccatttcttcttccactcaatcaaatgtaaatgtgcaacaagtactatccaccattacggatagcgtccaccacgctaccccccaacaccgcctcactcttcggcgatgtcggtctctccacgcgattgcatcacatggaacctctgccggctccgtcgcttctgctggaagtcggacagcggaccaccacagttcaggtgttcttccttgacccaattcgtctccgcgtggtccttccaacgcaccaaatattccttgagccgtcgaccgtagcgggtgcgtctctccgtcttggcatccaagatctcttcaacttcatactcgttgtcaccgcgagtttgtgcctcccagctatcctcggggagaagttcttcgtcaaagtcaaatcgttcgctttcatcaagagtgagatcttcggcgggtcgttcggggaactgtcggaccagcttcagcttcgagatgtgtacgatagggaatagtcggtagtcagtcccgctgatttccagcttggcagcgtagtcgctcaccatggtggcgactctgaaaggcccatgccacatgtgagcgagcttccgagcgtatccgaccttgactcggtcgaggtacagtcacacctgcgatccctccttaatgggtgactccggtacgttctcattgtgggcttccgcgcgactctcacgagcttcggcgaggagacgacgagtctctgtctgagcacgttggtattggcgttggatcttgaacctccatttctgtgggtcgagatctcggcttccggtccctccaacagccaacgatgcttcaatagtcgttttagggtcccacccgtgcagcaaaaagaatggcgtgtccttgcgtactcggtcgtgcgatgtgttcaacgcaaacaccaaccgctccgcatattcattccagtcctgttggttctcgtcttcaacgtacatccgcagagatctggaaatagtctggaccatccgctccgctgtgccgtttgcttgaggtttatacgcgagcgtagatcgctgacgctggcccagcagcgtattaaacgaccggaaaaagtcggacatgaagctcggttcctgatcgtgcctgattacttcgctggctccgtaccgccgaaacacgcattcctcgtatgcctcagccactgttggtgcggtcctgtccgcgtttgcctttgccacaacgagaaggtgaagagatccacgaagactaggagctctgtgttgcccttgaacgacttcgggagggtggggatatgatccatagccacgacctggaaagggtaattagcggcgatattgcccggcgatcgccccggcaaggtgggttttccttttcccgtctcgcagtcgacgcactccccgacatacttctgcacacttcggaacatacctcgccagtagaaatgcctccgaagcttttggaatgttcggctgactccctgatgacctccctccacacttgtgtggaaatgatgcaggagatattcgtggagtgtactcggcattatcagtttcaccatagatccacggtcctcgacatcaccaccgcgcccctcgactggacagtacatcaagaggccatgctcgtcgacctcgtaactgccagccagtttactgcacgtcttggcttgacggctcgagatctgagagagatcaccgtgcaggaaacacttcagtgaccagatccacacctcctcgtcttgagcacggcaaatacgttccaagcgcaactgcttgacgacgtcttcctgcaacacggctggtgcgacagtacgagatcggcttcgcgtgacagcgcctaccttcggatgggcgtcacgttcttcgcgcgtcttgaggagctcgtccagtcgattcaaggtctcgaggtccgtgtaatcggtgtgactcgcgacaactaccccggcaccacgctgcagcgcctgtcccgccagcatatccgcgggttggttccaatcgcgttttacgtggatgagttcgcattgcggccaagaccgcaaaatcactctggccttctcacgcaagagctggagtcccgatgacttgcactccatctctccacgcagttggcggacgactaaattggggtcgccacacacaatgagacggtcgatctggagatcggcaatcaaacgaagtccgagaaggaggccatggaactcggcctcgttcacagtgaggtccggtaaatagccagattcagccttgacaaccttccatccaggagcatcccataccacagcgctgaaagctccaccaactcgtttcggcttggccgatccgtcaaaactgacgacgcaaacgttttctccgggcgtaaaagccggcatcgggatagccaatgctctcgccgacttcttctgcggagagatctcctccaacgctgcatccatctctgcgcgcggagtgatactggcggcaaccaaacctagtagctcatcttcgcctttcgttaaacgttcgatctctagcgaatggggggagagcagcgccgcccactgagctagccgtcccttcaagcctttcgcgcggaagagccatgcgagagtcgtgtgtctggtgagcactcggatgtgtcgaccactcagcatggtgtagcagctatcgaggattcttagcagagacagtacttccttctccacaatgtcgtacccgatctcgtgagaccgcagtgtcctactcgtaaatttgacgggtacgtacactccatcacgacactgaaggagagaggcagagatcgcccacttgcttgcgtacacaatcacaacaggatccaactctggggcaaaatggtagagcatgggtgcgttgatcatcttgaacttcagggtatcgaaggctcgtagcgcgtggccccatctcacagtcgcctcgtgatttctgctgacgtttgtggctcgacccttgatgaaatcggaatctccgaactcatacaacactgtggcatatactgcgaaatcttcgatgaagcgattgtagtagttgagactgccgaggaatgactggagagccttaagcgttttgggaaacttcaacgcctccagacttgcaaaatctttcggcttggtaaacaggccttcaccggagatctgatgccccagatagtcgactttgctcataccccaactgctcttctccgcgctaatagacagattccagcggtcacaaacctctaggagcttcttgaccttctcacacagttcgtcccacgaccttgctccaactaagatgtcgtcgatgtaaaagcgacgccccagcaccgacggcagcgatcgatcttcaggaacaccttcctcgaaaatgttgacgagatccgcgcgatcttgacccggcgagatacgcagcacgccatataacgcattgtcgatcagccgctgatagatttggggggcattcttcagaccaaacggcattcgcagccattcgaacaggccgaaaggcgtaatgaacgcggagatctctcgggctcgatcggtcatactcaccacccagaacccactcgccacgtcgagagaacagaaccacagcaaactgtcgagatctccgaggaggtcgtcaatcaacggcatggggtagaccatcagtcgtgtcagagcattgaccggacggtagtcgatacagagtcggacgtccacgccgttcttcttgacgacgataacgatcggagacgcccaaggagaagtggagatccgaataatcttcgcccccagtagccccttgacgagttggaacatctttacggaactgaggcgggatccggcgacaacgctgagccaccggtcgtgcaccaccaacgtcgatgtcacagatcgcccccgtcgccgcagggggtaaagcattccctttgccgatgagaaggtgacgccgctcccaaatgatatcacgcagacgatcaatctcctctgctgtgttctcagttggatccccgaccttgagagcttctcttttaacttctgccgtcagggagatctctggtaactccgccatctccttttcgatgtcttcctcagtgagatcggccccttcatgaacatacttcgcttcatccatgtcggttgcatctccgccttggcttggtccgacctgggtcactgggaggattccgctcaccggctcctcttctttctcgtcgtcggtctgccagtcaaaactaccccagctactagtagactcagcgctttcggacgcacagctacagctgtcgctccagtcgctttcaacgatgaccgacaacgtgcgatgaaccatttcctcggtggccgcggcgtgtattttggattgtggcatgaggtcaggggtatattctgggaactccttgcggagctcggcctcagccacatttgccggagtcgacgccaagcctaccggtgtttcgccactgttcgtaaaggataggccgctctcctcgcctgtgtgagtttccgtacgcggtagactggagtcatcgctgtccataccagcgatcacctgatcgtgatcggtagagatcacgtcctcctcggtttcggtcaccctagtcggatcagtcgaacttttcatcagctgcatttgaggatgtgtgtcgtccagtgtgagtcgcgtgcattcttctgacgttgctgctgcttcaacggtcttcacttgtggaggccgtgctaaaatcgcagtcggagtccggtagctaggacgctcgaccagcggtccagactcttcaacttccgcttcgtttgcatctccagtgtccacagctgcttcgaacgcaagtgtttgccactcccgatagcggtttgaatccttcctagcgaatccaggtcgacgcgggatctgcccaacgggtaaccagattgccaaacacaccaaacgatccagtaccaggcggctcgtgctgatgttggtgatccggaggtatgacttgttactgaatccaccattcaccaccgtgatcacccatttttcccctctcgttacccacagttcaaaccgcttgttgtgggacttgagtgagatctctgtccattggccaggaccgacttcatggaatcccgttgcgtagaccgcgtcagccttgctgctatacagtggcttacggtcggtcatctggatgcgaacttcgtccggcagacagagcgttccgtcagccaggtccaacctcacccccgcaggaaccataaaatccatgccgataatgacgtcttgtcctgagagatctccaacccacacacggaacttgtacaccaactctccagccagagtgagcttgacttctactcggccttctgtgcggtacacagcatcccacacaccaacacaatccattgtctgtgttgtatcaatttcacaacccaccttacgtgcaaaggtagagtcgattatcgacacttcggctccagtatcaaagagtaggacggcacggacattgttgaccgcaccggtcgccttcgactgcttgaaccacttggagggagtgtaatacttccagtaacctcggcgttcacccggcgacagtcgaagggccatcacacaagggcgacgcgaatagtcatcttcatccgaggtaagagatctggctgtattcaccgcattacaggaagtctgggtcttctaacgctcgcgccttcctctgaacatatgcataaatgcagaacttcgatcgctcgtcacgtaccaggctgttcaggcctggcgagcggtctagtttaacgccttctcgacgctctcgggcagcagtccggcatggcgagtcgggttgtaccattggcgaacagcatagaagaagtcgccgattttacacagacctgctttgtgaacgtctccacagcacttgcagacgtagaagcacttgtcggtaggatggcccatgcgtccacactgctggcacgtgagcctcttccagcacccgagatccgtatgcttgcgagatccgcagtgtgagcatcgagtgccgtacttcgggcgccccagttggtcttcgcggtcttggcgcgcccctggctgttcaccatctcctggtgtaggcgtcctggctgccgaaaacacgtgcgctctttcgtcttcagattcgctatcagaactgcttgattcgccctcgaactcgagatcttcttgatctccgcggcgtccgcgaccggtagtcacaacccgcaccgccctcgaggaggctgcaggggcgggagccttttggcggtatttcgaaccttgggtctcaatcttgcggcgttggtggcggcgtcgcatggccaacaggacgccttcgagagcttctgagtcaggcagcctcaacactaccagagatccggcgagatcgtcatcttggactgtatcgatgtagtggtcgacgtgttcacgtcgttgttccttggtgccatcatggatcttcaagtttgcacgtatcccggccagattcagccggtataagtaatccagtgggtcttcctgactcccgcgccgcatgtggtagtacttgcgcgcgagggacatccctttaccgcaaaagtggatctggaactgttcacccaggtcagtccacgacgcgcgagcggtgcggctcagctggtaataccaattgcgcgcagggcctatcatcaaatcggcaaatgtcaagcacatctcgtctggctgcatctgatcccgtcggaaagccgttctaaccttgttgaaccaggctcgggcggcttcttcgtcatgttccttgccgctgaagtccttcagttcggacacagccgatgctcgcaacctagtcgccgtggacacagctgcgacacgacctccggttccgccacctccaccatagccgaggtcatcggataggtcatggagatctccttggtattccggttgtgtctgggatcggtaaccgatacgtggccgagcgggagacgcagtgacgggttgcatctcaacgtcttcaggctcgtctcgctcgttcgcaaactggtaaagaaggtcttgagccacaccgccggggcgatcgggctctgttgcaacctcttgagcctcctggatcctcccacgtggtcctctcgctgggcgagtctgcgcaatatttgacacttgcgcagacttcccgcgtcctacatcgtttgcagcgatcgctgggatcccttgcgcacgtcgttctcagcgggacacacgtggggccggtggaggtttcttggttgaggtagtgctcctcatgagagcgtcaccgtcatcttcaaacttgaaggagatccgcgaatcgtccaaccgaggaggtgtgaggtctccggtcggcaacggcgcggatgagtcatctgcactcgggacaagcttatgcaacactgcgtacacccgcgcgagcgtaaggacggtggtttccagatcgtactccgtacatcggtggagatccgctgttcatgtaccttgaaaccagcatcttcgagcacgcagaacagcatcgtgacggcgtgaagcggatctcggattgttagcgtgcgcgggttgcgaactggacccgtgagaggccatggcatcgtcagccccaacttacgcaggagcggatctctctggagcaggagcgcaagctcttgacggaagtagttgacttcggcttcacgaaatcgtttgtcttcatcgtgagtatcgttgctggggccatggaccgctagcgccgagatctccaatttctccgttttcttctcggctttcttcttcgtatcttcgacttccatgtagtccatcgcagcgtctagagcatcgcttcgggcagcggggtcgcggatgaccccctttagatgctcgcgctccaggtttcgacctcgcttttcagcgacgccggggtcccgcttagcagcaggtccaatggaactcggtttttggaccgagtcccggacggctcctttcggagccttaacggggaacttctcttcgtaaacgaaatccttcggctcaggcgtccccattgcctgtccgtcggtggacctagtgttttcacgttcaactcccgccggtcccagcggagttccgtcttcccttacctcacccttcaccttcacgtcccctctcggactagtagatccgggcacgcgcaccattgtggtggagtccctcagataaaaactaataaactcccacacgtgtcctgccacgcaactacggaggggttacccctgcaagccaaatacccaaagacaacgagaactagtcccgagatctctaggcctcaccttgtgtacccttgtagcaagactcggatctttatctagcgtaattcctagaagacgtgtaatatgaaggggtgaatatggggttccttacactcgcaggcagagacttaggttaactctgccgcggatgcacttgtacagcgaggtaactcttcccactgtacgacaacttgttgtacaatatgtacgagatctactggagatctcctgccgcagctagtctgcgggtccaaaccaaagtgcgagacgcacaccaataccttactaaaccgtttagagtgtcctactgtcgaacactgagagctgatctcctgagtccagacaatgcaacacactacgctactagaaggttaccggggaggccaaatcaatccagaaccccgagtacacttcacaagtaggtaggaaacagtcacagtacacacgtaggcgctaaccgcacaacacaaagactaatatgaagaagtaccttgtctcgttgttggaaattctgaactgaactgcctatctaccggcggctcgtctgccggccaaccaaccaaccagtatgctgcacgcctttacctcatgacgtcatctgctgtctcggtgcggtgtcatcgtccttgttacgggcctccccgttctggatctccgtaaatacgccatcgggtttcgtaatcagtcgccggccttctatacgggacgccgagctagggtgtcccataattcaagtggctcactttcgggtcaccttcgggtccttcgcctcacaatccttcaacccgcattacgacagctttcatcggctgagtcacgactggccgatgctccgcagtacagggaagaacaccacgggcatgtgcctgctcgtttacagttatctgccacttgtcctgagctgtgcagtagaacaccttccagaccacgccacatttgccaaactcgcgacaagtgctgctcaagcaccgaagacgtctttctgtcatcgtatgttcaccagcacaaacacggcagttgtcaaagtcgaccttgtgaaatatcgccgagcagcacatcgactcgtcacggtagtcatcgaattcccccgtggaattgtgcacggctagctgatgccagccagccatggccgctcctgaacgaaaacctttgtctgcagccgcccgtatggtaacttggccagcacaattaagctgatatttatatgcctcacagtggttagcggttatattggtgccccacaattatagtctctccctgttgtcactccaactgtatggtgcaaactcatatttatattcactccccatgtacgtatatttgtgcctacaaatctgtatattttaacaccatcgtcagctcagaggcgagaggactcgagactcgagcgttgagcggtgcgcaaggtctactgggcaaggaggttagtggctcactacgacctcgacccagttggagcgctgtatgttgatgaagctgcgattgggcacgttcagctcctgactcacggtctccatcaggatcgacgccgtctacagcagcagcagtagcaacagcaactgcaaagacgttcattagccaagtatcgctggttttggatccctctaccttcacctaacgacgaagcaccggaaaattcgggcagagatacgataacacgagataccaaaagaaatatgtatgagaactatcgcgttaaggcttttctgtaagtttgaagtggctgaagattataccgtcctttaaaactatgtagagaggtgggtcggtggtgtgaacgttagcgtacgaaatgactgtgagccaagcaaccacgacaaaatggatcatcttcctcgtcgctgacgttctccacgccgtccacaccctccagcacgtcgggcgagcccgggtcggcgtactcgagctccaggtcgggcgagccaatgggcgacaggaactgcagctcctcctgctcgtccgggtgtcttccggcggcgtcgaacagctccagcgacttgcgacgacgcaagccacgcctcgcggggttgttgaggtgcgtgtgcttgagctcgagcgcggcaaggcaggacttgcacaccacgtccatgcagtgcgtgcacttcttcttggagccgaacaccttgaacttcttgccgcattcgtcgcaggtgatcgatgatcccaacgcgaactatgtaaggtaggacatttttttactgcatgtatttactactagccttgttatgttttgaacggtatcataatgccactgcggccatacagtcgtcgttgcttagtcacggcaacaagggcaacctgcagtatggtatactgtacttggacgcttattctaggtctactactagaagagcggaaactgtgaagcatggaatttcaggactagcatgcaacgcagagatacgtggacatcgagaatacttcatcagtgctccacaagtactcgtcacgtagaagatagcgaactatctacttcaagtacttaagttttaattatgtatcccgaagattgagcttggagatacttctatcattaatggatacctgtctaactcctccaatgtgtaagctatataaattatacagcaacaaactgtttgtgagcactagcgtttgcttaagttcgtgctccactctgccccactctaagaaagtaattatcacgactccaccaaaaagttgtgcaactttctcagtgatgatgtggatcatgctgcgttcatcaaacacaacacctagtgtcctcgccccattatgtttaaacatagtaaagttaagatagtcgctatggtctcaaacagcttgatgtaggttggagttcctagcttgcttcccagccacatcatcagtgatggtccgctggaagtagcgcgtaccacacgaaaaaggcagtgcgaatcatttgtttatctgtgtagctttatgattgtgacagaacacgagtaactttacagtgtgaataccatcgatgcaaagccttacctctgacttggcattcaagtcagcaataagaggtcgaccttcgcttgaaagggttacctggactgaactgagctgtgttggctcaggtcgaagtaaaagatgttcactccgccccctatataatttagtgtcctttattcaacagcttgcctagcagtacaggcagcgtgaacgcactctgctgaatggtgcatgtagttgctgttgaagttgcagagcctactcgctagtgcaaaaattcagtattgcaaatgttcgggtttcgtcgaagttgcccaaaggtgctgaaggtgcttgaagttgcacgaagttgctcaaacgaaggtgctcaaaggtgcgcaaaggtgcacgaagttgcgcacctttgggcaacttttttcgaccaaggtgcccgaagttgcacgaagttgctgaaggtgcccaaacccaagttgctttaacgagagcccgtttatcaagagaacgacagtatgattgtgactcaactgtggccaaactgattacattactgtcttcgtggaccgttctgtattggctgacaggtttgaatacaattcaaatggagtcgcaaggaccttcctccactggagcgcagcagcagcacgaagaagatgtcgtgtaggatgtcgcgggcctcaccgcggaacaccttgacagacttggggttgcccctctcctcaacagctctttgaactcgtccgacgtgcccgtcggcgctgatggccctgcggaaggcgacgttctatcatcgaagacagggctcctagcgctaaactgcgtgcccgaggtggtatatatttgaggctgctacagtagtcaccacggggcgcaaatgttaattaaacttagtcacttttaatactgggatagcagcccgaattgtagtctagctgcggattctgctgcagaaggcacattatactgggagcacccgaagaatgagggggtggacggattaattggacgcgtaagcgtaacctggcgcaaccttcgtgctacacgagccagaagaatgtcgaccgagcaggttcaaagttgcagcaagacagactgaggcaggaaatgcacatcgacatcaacagccccgtgcaccagcttcagaaagtgaactgcggcgcggcaccagcgttttatattaaaggtgttcccagccaagtcgaagacgacctagttttgcacgttttctatcagctgatgttaatatattactttatatagcgcattattcattcatgcacacactaactgtgcttactccatgtgcattccgtgcgcgacgcccttctcctcgtcctgctgcgctgccatgttattgaaaatgtgttccagcgccgtctcactcacgctgtactcgtccacgttcaaatccgcgcgcgtatgttcgagcgcacggaatatttcggccggacgcagcagtgcgtcgctacttggtcgatgcttgggcacttggaagcggaagtgctcgccctgctgctccgcgaggacgctgcccgggaacgtgtcgtggaagaagctctgcagccgctcgctgtgcgtctccgagacccaccacgagcagaaactgtcgaccgagatcgcaccctgagcttcaagctgactgctgagcaaccagccagtgcccgagtggtccaaaatgcgagagccgcgttcagacgagcctagcgccgtgcacaagtcttggatgttggcgcttgtgatctttgctccctgagtcaggctctggcgctggctggttcggctgtttcgatgcgctgagagactcctctcggctgagaggaaggccaccatttggtccataatagcagtcagctccgcatcatctggattagttgaagccgcacgtagcgtgatctccaccgtgaatcctcgaccaaacttctgcttcaggtgctcgacgctgccaaggcatttcaaccggccactcacgagaatgcccacccgagagcacagcgcctcgcactcctccatcgagtgggtagtgagcaccacacaagctccaccgccgcgatctccttcccgatcggtagaacacacacgcgcgataacgtcccacatcttccgtcgtgagcttgggtccacgcctgtcgatggttcatcaaggaatacgacacgaggacggcccaacaatgcgatggccgtcgaaaccttgcgcttgttgccgccactaagaccccgcgtgagcttgtcgcggtacttcgtgaggcccaactcctgaatctgctcctccactgcggtgttcacgaaagcctcggggatgcccttgatccgggcgtacagctgcagttgctccttcacagtcagcaggtcgtgcagcgcgtcgaactgcggacagtagcccatggtcttccgtgctgcagccgaactggttgacaggtcgaagccgctcagagtcacgaagccctgcgtgggcgccagttgtcccgtcagcacagccatcgttgtcgacttgccggcgccgttaatacccaagtagccgaagcactcgccgctcttgatggacagacacaaatccttcaacgcgaccttggcccgaggcttgccggcgtactgctggcgcaagttccggatgaagacgaggtcgttcggctgaggaggctcgtgctccacacgctgccgctcgtgctgcacgtcatcatcctcttcctctgtcgcctcgtcggagtccacacccaccgcactatgatgctgcttctccgaggcggtctgattccacttgaccgagcggttttcaagcacgaacacgagtgcggtcagcactgctgcctcaaccagcgtgtacaacagcggggcaccgatgatctcgataccaaagggctgtcgtacgcagcacgaaggggtcaggcggtcccagcactccgtgcattcctctttgccgaagccttcaaacaacccgaagaacgacggagacgccggcatccaacgagctgaaccaaacagagctcggcgactaaccttccgcgttgccagctcgaagataccgttgttcagcgtgtacccagggaaaatcatgaagatccaacgcaggtagttctggtccagggaggacagcgttaaggtaccggagatcgtgaagttgacgatgcggcacatgaacgagaagatgctcaacaacccgccggtaccgagggcgaacaccagcaacgcagtctgtgccacggcgtgcttgacgtacctcctcgagaacaaataggccagcgggataatggcccagacgtgggcaatcaccagcacgataatggcgaacacatcggctgtgcttgcgttcgctgcgccgctcggcgtcatggacagcgggatgatgatcgctgcggcgacgatggggataatcgtgaggaggacatcgtgcgtccagcacgccatccagtacgcggagacattggcgccactgatgagctgcaggcccttggcgttctggatcgggtccttctcacgaacaacgaaagccacgatagctgcggggatgaacgcgaacgccagcatgacgaccagagccactaagaagccgtttaaagtcacctgcaacttggcgttgttcttggcgaggcagttgctgttgtaacatggcgccgagccgcacgtgttgcacgggtaccaaggcgaagcgacgttagtggcatcgcagcacacgttgacatcgcagttcacgaccccgagggtgcagtagtcgaagccccgggagccgtaacacgccgagacatcatagtcgggatcaatgagactgctgaagttcgtagacgccgcacatgtgctctgctccgattccgtggggaggctggaggcgtagtttgggatgaaatctgccacttcaatttctggtaacactgcgaggatgatcaggaagatgagagggatcccaaccgagtaggccaatgtcttcttgtctcgcttggcgatctggaaacgtttcttcgtcagcgcagagtactgggtccacatcgacggctcagtgataggaggcgcagtcgacggcaggtttaccgctcctcctgtcgacaccaacttcaacgacgtggtacggtctagcacagacgtggacggctttcgatccaacgtaggcggcatacgctgttcctcttcatggtcctgagagatccgcaagaaaacctcctccagcgtagtcaccgaaatgccgtactgctgcactccaagctcatgcatctccgaatccaattgctccagcatagcggggaatgcctccgacgacgcagtcggcagctggaatacgagctccgagccggaactactcaggcgcttgacatcggggacgtattttttcaggaagttctgcactgactgcacgtggcacgatccgtccgccgccttgatcatagtcaggttgtaccctgcaccgaagcggttcttcaggaagagcgatgacccagcgcaacgcagttggccgtccgccagaatcgtgatgcgatcgcccagaatgtccgcctcatccataaagtgcgtggtcaaaacaatgactcggtcctcgcggctctgctggagcaaattccacgtgaagcgccgggaatacgggtccatgcccgacgtgggctcgtccaagaagacgagcttgctgccgcctaggaacgcgagcgctacgctgagtttgcgcttctggcctccagaaagcgtcttcgcgagcgcgtgacggatctctgtgagtccgacatcctcgatcatcttgtccacgctgctctgcagtttctctcgcggcacgtgcttcatggttccgaagagcagcaggtgctcctccaccgtcagatcctggaacagaacgtcgtgctgggggcaaatgccgataaccctccgcagctcctggaagtcgtgcttgatggagcacccgtacaacgtcgcgtctcctgccgtgggcggggtcagacctgtcaacatggagatgatcgtcgtcttacctgcgccgttgtggcccagcagcgccgtgatctgtccgctgtacatggccagatccagtccagcgaccgccactcgctcctcgccgtcttcttccagcgggaataccttcctcaagccgcggatctgcaaacacgtgccgttgcgctcctgcatggccagcgccgcattgaccggctccacagtcgcatcttcagccacctgctccggcgtcttggcgcttggaccttgtactccatccaccagccgcgcgtaggccccaccggcttgaggcgacagcgcgtgagtatccgtgctcgtcgatggtacgtcgtcttcaggggcgtcatcaatcttactaaaccagtagctcttcgtgaacaggaagtaccagggcttcctcacgccgtactgctgcggtagaacctgctccaagtaccatccgagcgccacaaggatcacagagtcgaggatcagaaacaaactcattctaaacgcgctgggcactgtcacaggctcttcccgaagccccacggagtacgcgaagcccgtgccgagctgcgcgcgtcgcagaatctcgtccactgccagcgcgaacgccgtgggaggcgagagcgcggcccagtagcgcggcgcgttggtgtcggccgactgcacggcgaagtaagggaagaacaggatgagccagagcaaaacggacgcgatggcggcggtccgggacttgttgaagaacggcgccacgaagtacgagaaggccgtgatggccacgctcaggctccagaagaggaacacgagcgtcgcatactcggtggtggggaacacgttgccgtacttgagctcggcggagatggcgaaggccaagggagtggccagcaccgccgtggtgaggcaccacgagaacagcagcgtggcgtccgacagccccatgatcttcatgacctcgcgcaggcggttctccttctcgatgaccatggtggtcgtggtcgtggacacaaacttgatgtagctcacgaggaagaagagccccagcaccgactggccgcccgtgtagaaggacgtcatggtggaggacggcccgccgatggcctcgagcccccagaccgccaggtcgctgcagatgagcgtttcgttggcctccagctgcgccgcctcggacgtgaaccactgcgagcgccagccgcccgacaaactgtccaggttggcgagcagcagcagcgccgtggacagcagcacgggcaggaagagctccacaacaagagacacgggccggcggcgccgcagcaccatgttcttccacacgaggttggtcacctgtctccacgtctgcgccaggcgggccgcgggccccctataggctgaaagcgtctggagtttgctgttgttagtgttctggttgttgtgtctgcgcgcgtacagacgcgagaagaccgcgaccgctgcgatgacggccacgacgacggcgaccaccgcgatgaggagggagttggcggtcgagaggccgccgtcgcactcgctctggtacgtgaagacgctgtcgaagagctccttgcacgaggccacagcgctggacgacgtgttgcaggcctggagggaggccgcggccgcgcagcacgacgccgaggcgctggacgactgcttggagcacatgacgcggcacacggagtccccgctgaagtcgtccgaggagctggcggaagacgaggacgttgaggaggaagaggaggagctggagttgttgtcattgttgtcgagcaagtcgggcgggaggaggtcgaagagccccgagttggtgacgcagaggccgtaggacaggtcgttctcgatcacggtcgtcacgcagctcgagagcgcggtgagcgtggcgctctcggcgtcgtccgaggacccggcgtcggccatggcgtccgtcgcggattcgattgtgagtgactgagctcatcgatcagatgtcggtgcacggctggcgaatcgattaaaccccccggtttcagcaaatccaagaaaatactgtgagatcgcgtaacctgtgaagattaaaagacgcaatgttgagtggagtatcagtaaagacctgcgtaaataagttttacgctgagagaccatatttacggaagcgagagcaaaagtggacatcgattgcttgatcgttggacagttccgttaaaacgcgtgcggaccgacaagccgcgttgccggaagtcagcgttgagtttgctgctctaacagtgaaaagaggtcgtgaggcaacggctcctttccccggtgacagggggctggctacagcggcctcctgaaagctggtggattgaagcagctcatagcggcgccaggttagcatggctcgcgccagtcgcgcttcaacgccgctggtcgatcggcgcagctgcgcggattgcttcgtccgcgccaaagcttacgccgcggatggattgcatttccggtgtgaggctggaactgtgagtctcttccgaggtcaacggcagggtgaaatgaagacagactggaagttgctctcggcactgtatccactttcgtgccggccgactcacaactgaagcgtcccaagccaaatgtgcccccctgcctgcacgacgccgcctggaccgccggcaaaatgacccattggatcgaacttcgccgcttcatccgtttcctgtcgacaggaaaaccatgaggacggcactgccacctctgctaccaaccggttcctgtacagtacagcgcgcgttgggcagcagcagcagcaaagctgctgccggcagcgtccccattctcttagcgaaggctaagagcacaacgctcaggggtgtaacaccctttgttctctcagcgaaaagctgagagccagcagctttacgcgacacatcaatgcatttgccccaatgaagcggaccatcgaggcatcatctacagatcgctcgcaattcaaaggcgatctactacactgctacaacactctccttcaatactagcttgcaatccaagccgacgcacagcaatagtagctgtagctgccgacaataatagccgatgcctaaaggtcgcggcgcgatgctgggcgctgtataaaacaagattccgtcatcatccgaagtgccgagcattaaaccctccgttttcacaggttttggccaaaagttgacgcaatctttcgtttaaaactaaggcgcgctctgcacgcatgcttctctcagcgaatgataactacaagttgttctctaagcggatagcttggagccagcgtcatttcttgtcagaccatcagtttaatacattcggtacattttaatatgaaccagagtatccaaaatctcatggtattaccggtataaagcaaccggatcgatgcttttgacgtggttttggatttggaataaaacttaagcaaaacaaaatgtgcggtttaattcacacccaccattacgatgcatactgtggtactgtgcgacgttggggctcatgcaggctgcggaatccaaaacggagtgcgcatggcgcgacagtagtgtatgcagtgtccggacgtcgcaccacagtagtatgcgtagtgttttctggacgtcgcatcatattgagtaccagtatctacattgatatagacggacaagtccatggtggtgcactttagagtgctcgcttagatgggcgtgatgtttgctgcagcaagaacctaagtaaagcaatatgaacgcatggcgcagcgaaattagcgccaatttgcaccgcgtactttataactgcagtaacgtgtaaactgcatatgtagttcgtaaaaatagaggtattttactaggtgcggctcgcgaagaagtctcgttggatgacattatactgggttgcaacaactcacgcaccatggagtactgtagaccttaacagttttcttcctgatcgtggggtgagcaaaaaaaagatagtaacagaaatagcgataacagtatcagtttcaaagtcagtaactaatagcggttgcagtagcggtggcattgacagtagggcagttgcagtggtagctggcagtgatcgtgacgcaggcgaacaattccaatagcaatatactgaataaaaattattgtgcctttcacttattctgccgtgataattctggcataactctaatccgttatcgaccttaattataccccgagttagctaattcccatgttaattccgggtcgtccctccgtggccgaattaggagcggcgatggtgaggccgactcaaggcggaataagctaatccagccttcgttattaatagagcgattggcggtttcctatccgccaatccatgccattctgttcgtatctccgtcgattagctgatcgcggatgttaggggaagcgctcacaatcttaggcagaattagcactaataagcgttgatcacccatttatgactctaattccgcctgaattaacagctcacccgccaaaatacgtgaaaggcacaatacgtcatattgatattacttacgcagcagtacaagtcacacacattatttggaaaagaggagagtgatttacaagggtctagaggacgataagatcatcgataatgtttggatcgcgtcgttttcaccacggtggacggcgatattcagatggcatctacttataaatttagtttgagcaagccatgaaatgccccgtgatattatgcagcaagccaagcagtatggagtagattttggcagtctttctcaggcatgaaaaagaaagcaggagcaatatcattacagtgccattatcaatgctgagatcgtagttgtagcgtaaataacaacggtagcggtagtggcagcagataataaacagtcgcagtagcgatagcagcagatacgaacaagcaatatcaatgacaacattactatgacatcattaacagtagtgaaatagtagttgtagtagctgtagtacagctgctccagctgtagttgcagtagtggtaagaagatagtgcctgtgaccagcagtaacgcgcgccacaggtagcataacaaatgcaatatctttaacaatagtggaatatgagtagtatagcaatataagtagtgatgaggtaggagtaggagcagcagcgatagtgccagtgtcagtgacagtggttgaagcagtggcagtagcagtgacagtagcagccgcagtagctgtagcatggcagtggtggcgacagtggcagttgcaataaataccaattgcaacatgatgttgtcaacatcagggcccctccaattcagtattatattgaattggtaaaattgcttgacagtaataatgatttaaatatgacgataaccaaagctaattattatactgattaaatatttcaattccatgcgccttgactgtgtttttgaataccctgaaatcatacgagccaataatacaaatttcaatgtggcgcttgccaataacacatattttcgtcatattaattgacaattttcatattgaaatttttttcatacccctggtcaacatcaattataatagtatgaaaatttaagtttcttgtagtaatatgaagcgtttcatgtatagtactcacaaaaatagtggtgataatgttaataacagtaacaagtgcagactggcgctgaggcgcggcgcgtcctaaccgttttagtagcaaaaaacacaaaattgttcggtccgcttagagacccgcacgcgaagcgcgccccagtcattgtatcacgcaaataatacgacgcgtactatcaggatctatgtgcttcgctggagaccctatgagattttgtacgccaccttttagtgttgtagtagaatgtgctacattactttgcaagatttgaaaattgtagttgccaatgtcaccataactattcttttagctgcaccaaatatattaaatgcacgtagcactctgttatttagcttgaccgagtgtaacgttttcatcctcaactcattttcatagcactttctactgtttgaactcgcgagcgtagacacggctagtaagacgatttatgctgcgcttctaaaagttggctttgtgcaaatgctattgtgaaaaccgcttcttttgcctattttggtcgtaaatcgatcgattagcaccctgatttaactccaaatcgatcgcgtcctgcgatgcagcagattaggcgatcatttaattgaagtcaagtcggtatagccgcgtttggagcagagtgcccaccttttactggtcaatcgcgcagccaagcgatgcatctagaccacgatcgatttcagccctgatttgtactctgattaattaagtagttgaaatctaataaggggttgctacagatgggcattttagccggttctcacaatactttgtcggtgcttgcttggatgtatatagtagttatagtagtgataatagtagctgtagtagtattgtgcctttcacttattctgccgtgataattctggcataactctaatcccttatcgaccttaattatgccccgagttagctcatttccatgttaattccgggtcgcccattcgtggccgaattaggagcggcgatggtgaggccgactcaaggcggaataagctaatccagtctgcgttaggcggaaacagagcgattggcggtttcctacccgccaatccatgccattctgctcgtatctccgtcgattggctcttaaatgctgatcgcggatgttaggggaagcgctcacaatcttaggcagaattagcactaaataagcgttgatcgcccttttatgactctaattccgcctgaattaacagctcacccgccaaaatacgtgaaaggcacagtagtagtattgttgtgagctattatcagtattcaccccagtcggttagctttttctatggtcttattctgatatgacatgacgtttggtctgaaaattgtgggagggatgacccacttttctgctaaagctgagcctgaaggcgctctatgttgaccggtacccagataaacacatgagctaacgggtccattggcctcaccttgcctaccacctactcaaacaaccttgtgggtgcatgcagcaaccaagctcgcagttagcgctgctcacactggcatgctacatcgttgttacgtcgctacaatcgacgtcgcctatcctgttcgcatatgtacgatttgatgcaccgggactataatatagtccaataatcaatattattgattattgtattggggagggccagatcgaaatccatgtcatgtcggaatacggacatgaaaaaattcttccaccccagtcggatttggatcccccgccaataactagcgcaacaacttagtcaagttatattgtggtagctagcaaaacgagatagtccattaagcactaattacataaagttgtggtttgtctgatacagtggtactttccatagttaaaaccctagaaacttcataaattacatgaatgttgcctgtgtcgccgcttatgtatggtcttgatgttgcgtgaaagtactttaaacgtatcatgtactgtgttgacagtctgaactcttgtgcgcgcgaagtttgcttgttataacatcgcacaaagtctaccgcactaatagtacgactgcatctgtttccggtacatttgaatatgagaagaaatagcaatcttatctatcattgcagtagtaggaggggcaagtatactactagtgcacgaatagaaatactggtaaaacatcgtgatctagacgcaagcaataaaatgacatattgtactctttcattctccgtgtaaataatacagtatcacgtttctgtcttagctgtcactactttattgcatgtagaagtagtgctttgggataatatattcaaggacaatttagcaagactatattactatgcatcctgtggaagctttacgcacctgggtgatatcgacagcaatgggctgtggtagtgaacttgtacgctgtacactgaacctgctaatatacctgcttacaacggcaggcatcgcagagaacgagcatgctctttgtagatgcttgtagtaaggtgtagcaacgatgctctttgtaccgcgagtttaggcgcatgtaatgaggtgaagcgggtcttttgacgttgctgccagcaattaagtaaaagctcacgcagactcccaatactgagaaaggcgtgagcggcaagttataacctgcacttgtgtgtacagtgcagcgcgtgctcgtatgatatcgagtgcaacggtgtggtgaatttgtacgttgtacactgagcctgctaatatacctgcttacaacagtaggctctttgtatatgcttgcagtaatgtgaagcaaccgtgagtttaggtgcatgtaatgaggcgaagcgagatcttttacagttaagtaaaagcttgcgcatactcccaatacctgagcgtcaagttatagctacacttgtgtgtatcgtgcagagtgcgttctcacagctgcgtggagtagctgcggtcgtcgtctccgtacacgatgacggtgtcgggggcttgatttagcaggcggaggagaaaatacaccgtttacaagcccagctcgagcgcgccgagcgtgcccagcacctcgctgatcgaagtccgtatccggcacgatgagctggagcttgtcctggtgcggactccccccccccccccccgcggtaaatgtgctcgcgcggcgctctgagctaaagcattttttgagatttcagcgtaagcactagcttttaatgggtaacagtagcttttagtggaaatattagcaaattatggattcggaactatagaggagctgaatgaaactacgtgtaagtgaatgaaacttcttctggccaatactttattcaagttgctctgagtgcttacttaaatgcgaggttttatatggggtgctacctacttaaagctgctttaaacccctactttatgcaagccatttttgagtggatacttactaaccagttttatactgatggtcttccatgcattgatgtgctgcagaacatgtataggacattatcttgttttatttctattttattttatgcggttaacgccgattgcactcagggccagctctgcttcagccccgcatactagatacctttctctctacgtacccggcggctactgctatgaacctattgcccacgatatcgatcacagtgcagcctggatagtgttatcttgacatcagcagtatggccccgtgtgcatgccaaagagacttgcgtgtagtgcacccaatgcgctgtagaacacccgcatagctggaatcagcaagttgctggctttgaagaagttaaacctagttgtattgggcgctctctcgagatcgaaaacgaaattcgctataagcttgcagtgcaaaacattttagttccgcacccaccggctgagccacaccacggggagagctcgacagagcgagacccgggggctcagccaagggggggcgcgggtatttagcttgtaagcttttcacaaaaagcaacaggtcgctaagagacctgcgtgcaccgcgcgccgaagtcgcgaggaaatcgaaaggtgccgcataatcgccggctgggctccccgacgctggatttgacgctacgttggcaagcaaccgacgcggccagcatggagaagctggccacaccaacgtccgcagcgcagcgtgaccaatgcgctgtaaaaccaacaatgaccagcagcagatgccagcagcgccattcaaaagtgcatttttgatgatgtcgccgcggatggcgatcatgattaccgcacggagtcagccgcgaaggtcagagcgacgtcaacatgggtacgaccctacaactttacccgacacatccaaattatggatctaggaaggttttttatcgaatttagcagtatattacttgtctaaaccgataaatctcctttaacaggtattaacgtattatcagggtaaagtaagcgcgtactcatgttcagacttgatctttggcggtgcaatctgctcttgtcgcatccgtggccatgactcgaagatgaaagccgtcatgaaccttggggcgtgcgacagcctactgccgttccaacaccagcttcacctcgccgtcgccttccgtccggcattcgcagaattccaaggccaagctccaagcaaatgcatacactgcagacctcaatggcctcgtcgtcgctgcgcacctcgctcggcagcagcggccactcgctgggcgactcgtgcatcgacctgtatgccgagcgggtcatgatcccgcggatctcgctcctgtcgctgctggccggcttgtcggcgctgtcggtgctgctcgtccggcaccgtcggcggcgacggctgcaacgcgtccggcagtcggccaagctgctgccggagaaggtcgtgctcgagtcgtcgctcgtgtcggacgacggcgacgagctctcgtctcggaagcgctggttcgcgtgcttcctggccacgagcgtggcgtgggtcaccgtcttcctctgcaccttcaactcgtccacggccctcgcgtccacgtccatgagcgcggcacaggcgcggccccgcatcgtcttcagcttcacgacgacgcccagaggcatcgacgacatgcagcccacggtggacgcgctcgtgcgccaggagggcgacggcttcgacgccgtgtacgtcatcgtgcccaaaacgtaccgcgaccaggccgtgcagatccccgagtggctgctggacggccgcaccaagctcaaccagagcgagttccgcggcatcacgttcgccacgggggcgagtccgtaccacgacaagctccggctcatcgtgctggacacggacttcggcccggccagcaaggtgctgggcacgctgctggtggagcaggacccggacaccgtcatcgtgtacggcgacgacgaccgcatctaccccacgcagctgtgcgagcgcgcgctgcactacacgcacaagtacccggacgacgccatcgcggtgctgggcggctggatctcggccgaggacgatctgtactgtggacgcagcctcgcggtcggggtcaacagcgtgtcgttcgtgggaggggcgggtggagtcgcagtgaagcgcaagttcttcggcctggaggaggcgacgatgtcggccttcgaggtggccaacatgtccaaggcctgcttcctgggggatgactactatctgtcgcacctgttgagtcggaatggagttagaagacgacttgtatcggacagctgctggaacattgagtcactgacagagtcgttctcgcacgggggactgtcgtacgcgccgtcggaacacccgggaggggccaatgtggagcactaccagcagtgcattcgagaactgggcaaagaccaggacttatctcacgacggcgagtttggatctacattcatgttcgtgttttctcgactgtggggggttttgcgaggactgaggaatttatactttggcagcgaattcgtgacgtgctgactgatgaacgaacccgcaaaaatgtaacaatactggggacgtgacgataaaataatatgaatcgattgagttacttggaaagttagcgacgagctcgaaaatattagcatcatccgaggtcgaagataaaccagaggaatgccatcccgatctactggagttttagtggacgtctacgactaagtgaatattttcaagcggggagatatcctacacggcatcctcactcttcaaactaccaggccgcgctttcctttcagcaatgagcgctcgtgtcttctcaacgctcgcactcttcgtcgccttcttaatggcgtgcagcgttcaacatgcggctgcgatgagtgcggagctgcggatctacaaggagcctgagttcaagagactgcgccaaattatcatcgtgtctgcagggaatctctgctacgacatgccctgccagatcagcgacagcatttcgtcagccagatggacggggatgccagtcacggggacggcttacgctgatggacaggcgaggatcgccttctacacgggcggcaactgcacgggcaaagcggctgtggtgaacacgagcgtcggaaacgttcccgactttgcggcgttcggcatggacaacgtcacctcgtcttttgccgtgctggagacttcgacggtgatgaagcacaaggcgaaaaacgtttgtgagtggtaaatgtggtaggacctcggtgactggatgatcgagcgaagacatatttgttgtgacaacgctcggaacgaattaataagacctgaccgctttgctgaaccacgtagctacgcaacagttgcacgtttcaattgtttggaacgaacgaaagcaaaagtttcaccgtcaacggagtctgaaagctgtgttttttctttttcagtccatttttcgtttgggggttaccagcaaggttgtacggaatgaagcgcctaaagtgcaggaattgttgcagcaatttaaaaaaaaaactaggaggcggaagaatacccgactgtacctagttattcactgggagctaaaagttcaacgagccacgctcgtagcttgctacaagcattcacgagtgtttctcacaacctttggccgccctgtccttcatcaccatcgaggtctccagcacgacaaaagacaggatggcgttgtcgagtccaaacatcgcaaagtctgaaatcctcccgacgttcgtttttactaccgccgccttgcccgtgcacttgccgcccgccgatccgcacctgtccagtagcgtaggccgtccccgtggctgcgagcagaatccacctcgctgaagaaataccggcacagagtgaggcgcatggcatgtcggagcagtgatccccctcggtaatggtgaagaagctgcgtacatttttataatgggctccgtgaagaagtgcagctccccgcccattgaagtcgcacaagtatggccgcaacacgcggctacgaagacaacgaagagcgcatgcgtgacgatacgagagctcgtagattaatttttttttccattttcatggtgaggtacattgtgttcatttagagcaaggtactaacgatcaacatagctcttagattcagcaaggcagggcagcgtggcttggcgattttaaaatcgagggtatcgatcgagcggatttcagtatttttcatggagctggtggtagacgtccacttaacaccagtggattacggcaatgctgtttgaaaacgtgttagtaagttgctagattaccccataggctccaaatcaacgagaaaatggctgagatagagctaccacagtgtgtgcgtggaacactacatctacttcaagaaaaatcgtaaaccactgtaagttgcttgccgttgtgtatcgtttggcgtttgtgcttgccagcttcaccgattgaaagtcaggcttcaaactatcctcggcttcgaacgcttcgtcgccaacaatatatgggccgaagctgttcgttggttggcttactggtagaccggggcttgtgaccaacctgaatacaatcttcctcctaaaaaggcagtcgatgtatcataccgggcagagaattgaaacccataaaaagcaaaataccacttaaagaaacaagcttagaatacagtgaagtgctagttcatatttatagatgtagtcatcagcgtttagccctagtcttttggtcctacggccgcctcgaaggcggccgtagttgttttgtagcaagcagctagaaattctcaagtttagttctactgcgaccaggctcgagctgatcactgtgcattatttcattatttttttaagagtcgatgctcgctgtggtgcgatctattgatgccctgttgtgcgcaggagaatgcttgaaattgttctaatcgagtaattgggctggcatacctgtacacgtggctgtataatacagcaaacccttgaatggcctagcaggcgaaatacagcctgtatttcgcctgctaggccattcaagggttttcttagaatctatagaggaagtccacaaaacagagactaaaataattgtctattacttcgaaggcgatatacggtcgattcgaacgattatctgtaaagacgcacctttccaagctgacatcgcttcagtacccttggattccgccttgctggcatcatccgagggcgacggtaatgccatcctgaattactggtgtagcgggcgctacccgattcttaacactaaagccgcaacgtcggcagcctcactcactcttcaaattacctgcctggtgccaatgagtcctcgtgctgtcacactcgtgctcttcgtcaccttactagtcgcgtgcagcggccacagcgctaccgcaatgaatgggcagctccgcttcttcaaggaggccaatgtccagagtctgcgcagcatcatccacgcttccgcctcggatctctgctacgacatgccctgctccacgctcagtggcagcatttcttcagtgcagtgggcggagctcccgaccacggggacggcctacaccgacggacaggcgcgaatcgccttctacaaaggcgccaactgcacgggcaaggcggcggtggtgaaaacgagcgccgggaagatctccgactttgccgcgttcgggatggacaacgccgtctcgtcgtttgctgtgctggagacctcgaaggtgatgaagcacaagacagagaacgtttgcaaggggtaaacggctgcagccaagcttcgaacgctactggttgaacacttagttacctcccagggaataaataagcaaaaaaaaattgtgacaacgacgagataataaattaccctctggatagctagtatgtctcattgctaggccatagcggcgtgtcgaaagctacgctggcaaaaagatttaaggacaaagtcttttgttgtagaccgacaaggaagttgtgccggcagacctgatatcgactaggactattccatcaggaagattgtaggatcaccactcttcgtttttattacgggaggtcgttgttcccattccttcaaatggtcgattcgacccctttcaactggtagctcaggtcttgcaaccacccaccccgagttcgtcctcctgcttagagtttccggcattttccctggtgcgccacgtgccacttgagattaccgccgatgcagttggccttgtcgaagtcgcatttgttgttgtaggtgacaccgttgcttccacaaacgggagggtccgtcttggggcaagagccccagccgcagctgtaggagccgtcggcggaggtaccaacaattgctagtgcggcgagaacgaggacggcggcaagcttcatggcgctttgagttgggcgtgtggtggcggtgagtgttctggtctccggaaaattgaaagtaaggtgaggctggaacgaggtgcgggtactgtattcattccatcgcctcccgcacaacaatcagctctgtcgaatgcattggcgtcagcgcatatggatttcctaggatccggtttccatccatgcattgatgtgtttactctttggagcgcaataccgtattggcaagctttttttcttgaagctagactcaattggtggatcacgattgctgggcgcttgacgaaaacgagtaaactaattgtgtgactgttgacttatccattttgtccctcacatggtttcttgtttttgccgcgttttaggcaccacaaacaactctaaatttgcaattcatgtaccattttactttgttagggcagctaaatcgacgcaaatgagcggatgtgcgaatgcttcagttttaagtaaaaaaacgaaggtcgtacttttttgttcgggcgctgtgactgaatgatattctggatcaaattttcacaagttttaggaggcctcgtcatcagagatcgcgttacgtaacttttttcggttcaatggagaagaatcatcgtcttttgcgttacagtacgtacttgtctgtgcgctttcgcttaccgctttttctgcccgtgttgtgggggtccttctccgtgttttcggtatcacggtcgtcgccaaacagcgcgtcagggctgctacactgagtatcttcagcagcaagccttacagaggcagaaaacgacgcgcgcagcggggacgtgtcggcctggccggataaaaaactgtccatggcgtcgaacacgcgctggctaatgttaggactcttgatacggtggtacgtcctaggtagatgacaacaacataatatatcagaataaatactcaaatatcaagaataaatgaaactcataccttagctctttcttctcctgctttgttaaatcgaaccaacctggcttgcctgtacttccttggatacggttgccgttgaagtcacatatgaacctgtacatctcctttagcgcctgcattttgtcgtcgatagctttcggaaagcgcggtgaccccttaacaaccgctttgtaggcggcacaaatgcgctcggtgaactggctcgccttctcgccctcccgtcgcccctttcgttccacctcgcgccacgagcgcaccagcacgaggacggcctcttccgcccagttgcgctttcgatcgtcaatcagcggcgccgaacacgatgctaaacgcccctcgattgcgttgccctcatgttggccttcgttggtgctcgccatggcttttattgctgtgttgttgaatggccagagtacattcggtttcacaagttccaagcttcagggagccccagagctgcctgaaactttgtcactcaaacgagggaatcttggaacatttttcgcggtttcaggtaaaaaaatgagcatgctgaaggcaattttccctggaaccgcgaactatcttccaggtttcaggttccaagcgtttgctgaagagggccaatggtacggaccactatcgcagtgatctgattgcaaggacagttgcgactgccagtgacgacccaccacctaccgtaaaacgattacactgtacctagtcagtgagtggtaggtatccgtgttatgattatccttacagtactcgagactctacaatataaagtgccgctaaattccaacttaggaattttgcacactatcaatcgatttttcttaattgctgataaaagctcggttaggtctacttttagcgcgaggtagaattacagaagaacgcagtcacgtgcagcagttctccgacgagcgacccgtgcgatacgacacctaagtcggtcagctatacgtcgcaagttgaagcctgcagcaaagacgtgctcgtttcgtcaatggcggcatgctgcctgcagcggcactattttgatcagaaaagtgcacgctatagtagtgtcggcaacactcttccgtaggcatcatgagtgtgccgaggtgtacactatcgtgatgtttgcagccttacatccacagatttggaaaatatatatctatatatattgtttgaagcactgagatcagatttggtttgaactccgggtgcagcagcattcgagccgaccgtatggagtccatactatggactacctatttactgagctccgggagcatgcacgggccccgaaagacagcatggcggtcaagttttcgacaagaagcatttttgtagtgactcacggagtcggcgcttttctggcaagttatcggtttttgaggtaaggcgaatggataataaataatcaggccaactcgttttagagaagtgcaagtgtagcacatttggattgtaatacttccactagcaggaatattgatgcaaaaatattggtggtatagtacgttcactcgcgatcaaatagcacttgccttcttgtttcatgtatttagatagcatggatagacggaagtattttttctccccaatttcttcgaatctatgtagattcaataggacaacatgaattgccccgttctgaaatccatagcatctgcgtcttcatttttctcttttcacttcgttcgaggaagtgcagcaacgccataagttaactccaataaactcgagtcgagccacattcgtttgggccacttcatcgccatcgcttgaaagcatcttgggttgatcgagactggcgagaacgacgagaggcactcgtcgggagacctgtcgccttatccccccccttctcagccgcttctctggcattgcaaaactccacaaagtcgtgctcgtacgcccaaagagatccccgaacaatccaaagtttgattctgcagaaattccacaatcgcggcgcgatctccttgtgctgtccgtggccccaacaaatcgtcgactttctcttcatccgcgcaaatttcggtgccgcgtaggtcacaaaagtactcgttgagcttggtcttcatggcgggcgacacggtgctcgtatcgcaaaatatgaacgctcgagatagccaacttcaagaatccgtcgtcatggtcctcgtcggaagttgcttgctagtcttattgctaagcggcaaaagtgaaaatagcgactgcgagtagcacagagtgcgggggatgacaaatggcatatattatattatatattaccctcgggagaaaaaagtcttcaaaatccaaaaccctgtaacagtcacaagagcaatgaaagtccggctgtgatatctctttgaggttgcttgctaacaagaaactgaagaatggcaacagccttcgtgagagccacagcgtcaacagaaataacaacctagcgcttctcagcaattgtattttccatgctaaactccaaggtttgctataactccatttcgaatatttttttctggtaggaatatacagtatacatctttcacttcccttttaaggtgatggtgatgttcgtagtggcgtttacaagcttttactatacttcggcgagatgcttgctgcccaaccgccttcttgaaccgggaatacacttgctgtcagctggattcgtactggacgctggctgcaaggcccgccgccggcgctcgatgttctcctgccgcctgcgagtgtatgaggccgactgctcgtacttcatatagcgcgcttctggagcgaatcgttgtgtccacggccgacgcgtctcctttgtcttgctcaacttcacctgctttactccattaatctgctgatgagactgtgttctagactcctgagctttcgcaattgttcccgccgataggtgcaccgaattttgttgggcagcttccgaagcgggtttgtcggtgcaggctcgttgcggcacggtcgcaatctccgttccattgacgtttaccgctgtagtaagacgcggacaccaacaaagtgcactgcccttcgtccactcagcatggcgtcgagtggcacactccaagcggtctgtcacgtaagcatcaaactgagacagcagcacgaaaccaatggtgaacgcggggtcttgaacaaaccgaagtgcgatgtgtggacaccgtattgagtcatggaacgtccatgtcgcttgagaccgctggagtcgaaggcgggagggtgcccggtggcagccagcaacggatagaacgagagatactctgatgccatgagacgttgttctcagtcggatacgactcggtcgaggacgagctgagggaatttttggggcgtgtacgatgccccactcatcgtcactgtcagaggcgtctccttcttcatcctccgtgggcacagtaggagtcgagaaccttaagtgaaacacgagcgacacgggagtgtgagagttcaatgcaggagtaagctgagaaagaacgcgcgcgtgacataccgacaagagcaaaaggctgttgctatacgtagctggaacgaggagacggcagacctgagtgtcgtgcagacagtcacgcacagcgatggtgccatgttgtctcgtcggaaacgaagtagggaatgaaagctcgttggcagtcttctgcaagtacgtaaaagctcgaggcccgatcttatttgtgagtccagcgacgcaaaccaaactacagtagtagcagctgggggaaaccttgcggttggtactgtaccactcgtgctgcctcgtgatgaacgaccccacgagcgcgcacacgacgccatgtacaacaactcaatgagccacctcaaccgtggtggacagcccatatatggcacgacattggtagttctacgaacctccttgggcgggcggcccatgggcttcgagaccaaagcgcgtcctttcggtattaattatggcaggtagtcgcaattggtgactttttaaggtgacggtctctgggtacatcggagtgatgtttgctggtactgcagtgactaagtgctcatcgcgttactgtcactagcccgagcctctatcgaatgaatccaggcgacctctcataactaattatgaaccgtcaccaacatcttgcaaaatgagagagaatcatgtttaacgctactcttagttcggaacctcagcgttgagattcttccatgcgaagctagcgaagtactcctttgacttgaaggtccgcgtgacgaagttgcccacgaccactccgccgaagagcggcagctgggagacgccgccattcgggcacctgcgcggatgcctgccagtttcaatgtcagaagctgcgctcgtactttagccgaatcccgatgtgttgccatctggtaaaggtgaagtggaatcgatgtcatcacaatgcgagctgcagattgtctgaggcattctatgatcgatgtggctcacgcatgcatcttttcatttacgcacgttgttttcgatctgtctgtaaaatacattaattaggtgcgaagggtctcgattttcgtcacggatcctcttctagacactcacatagctctgtgttgaagtcgccgacctgctggcattttctctgactacgaccagcgttttgagcagaagaattgtgcagcagggaaactcgtacgaggccatggctaccaatggtgtctataccggtatcatccgatctcgtttcgaacaacaaaagtgaagttgttgtccctcctggacatcaggctggcgacttgccaacatctacgtgctcgcgatactggcaaatggaggcggcaaccaaacactcgcgtacacgaaaacgctttcgttgccagatccgcacttcctggtcacatccagcgctcgcagcacaagcatatcggctctgacccagaatcgtacccgtaaactgaactcatccaccagaatcctgattctttggtgtttcatccttcagattgaccgagtcattcctgcgcggtctggtatgaactctgactactaccacttgttgatgacagcgttgacgcttcaaaacgaagctccagtccacaacaacatcgatggcaacacccgatgcgttttgcactaggaacttctgactgttgatctcctgcatagcaaagcacggtgcgctcaacaagaccgcttctttttcttcgagctcagcaacacgtgaaaatccagttccatcgattctccagcatagtcactcctccagctaccactacaggatcattatgcccccgctacatgccctcaccgccgtcaccttcacgtgttttagatgcccctgatcttcgagatgatgtttagcaaaagctgatggactggggacctcgctattggacttggaagcaccacgtacatgtaccagcgtaccaccacaagcgagatccaggatatccccgctcgtatgagccgctggactgcgtgcccaaattgccacgtgggaaaagaacacgagttcctgcggagggggcttgctcatatcgtcgagctgcacttggtgcgctgactccgttcagacaaagatcgaatcagctcgttgtcacggagctgcctagatagatatcatggagcaccggcaacggggccaggaacgcatcgagcgaccgatctgcgtctacgagactctcagtcgaagctgctgtcagcgcattaatatttggcagctagagaccaattcaagtcgtggaagtgtccaagctttaagccactgcgcgacctgacatggcatacgtcgcgagtcttgcccccttgcgataacgctccgctgaagctgactaaacactcagcttctgaaacttgtttccctcgtcaaagttgccctgagctccacacttgacagtatccgctgaaaaagcacatcaacaccttggtcaaagcctaccacgagcgctcggatgccacggcctggggccggcgaaaagctcacgtacatatattcccgtagccgatcgtactggtggtgcctacgctctttaataacgccaagaaatatcggaagagaaggcacttcgttcgtgcagttccatttgttgttggtatctgatgaaccttactgtagaggagctagcaagacttgcaaatgcggcccgatagtgtacacgctcgctgggttcgggccaattgctccaggtgctgcttgcttgctgcaactttccgcaggcttctctttctctcacgttcgcggactctcgtgctgcttgtacgtggacttttccgccgttctggtccattcgacgttgtcgaggctggtttgttatgttcatttcgtcgtcgtcgcttactcttgatgtgtgtgtgtgcgtgtgtgctggggttggttgtctgtacttctatccgagggctttactcgacccgctgctccgggatccgctcgaagcgccgggtattcgaggcgccacagctcatattcttcggaggtccaattgtgatcgatccgcggtagctgcctccgacaaacgtgttctgaggcatgccgacctgcgcgcgctgttcgcgcgtgcagatgtagtggccagcgagtccgtcggccgggatcaagtaacccagcgtaaccgtgcgccgcgggccttcgcgcaccgacggcaggccgtccaccggcagcacggggtcgatctggaagctctcgtcgttggagatcagcaccaactcgatgttgaacatgctcgccaccgcgtacagttcggccgtggtcgcctgctcatccggagtgtccctgaaggtctcataccgctcacgcacgtcctcctcgtcctgcatcaagaagcctgagagctccttgatgtgctccagcgcatagtccatgagcttgatcctgagaaactgcgccgctgccactcgtcgaggcgccacgccgtccgccgcgccgacgttcaccaccgtcatccccgcggggtactccctcagacactgcagcgggtacatctcgtacacgatgcagtgcagcaagcacgatccgtcagggggcataccgacgcccaccaggcccatctgcacgagctggtcctccatcttggcgcgctgcatatccagctcgggcgtgatgatgtccggcgccgtcatggccatcatggagcccctggacacggacgccatcgaggcccgtccgctcgtgtccgacactgtcgacgacgccgggaaccagctgccgcgcgacgatccggggcccatggagcccccaaatgagttaccggcgaagctcgagcggctgctggcgaaggacgtcctgccggccgcgccgacctgcggcaccgtgtgccgcgcgaagctctggctgcccacgaagcccgtgccggaccagcggtagtcgctggccgtggacgcgaaagacgagacggtggagctgctggacacggagcggaagtcgtcgtcgtcgtcgcccatgacgctggccgtggcctgcacgacggcgggcgaggccaggatggacgaggacgggcgcaggttggagtcctgctggtcgtactcggcgttggcgccgaagcccgagttgaagcccacgaagctcttgagcgtctggctggccacggccgccaggtggaaggccacgagctgcggcttgtgcgtcaccacgttcatgtagttgtccagctcgcgcgcgcgcgcgcccaggaactcggggctcttgtccacgcggaagagcgccttgcgccggtagagcggcgggaacttgacgcccttcatgagcgcggcgctgcgcttgcgcagctgctcgtcgagcttgcggaaggccgagaagctgcgccagatgtgccagctcgtgcgccccgtggcgtgcgcacgcgacgagtagaaggagagctgcaccacgaccttgtactcggccttcttgctgctcaggcggtagtcctccacgcgcacgtcgcacgtgtagtcgccctggatgtcgtcgggcgtcatggtcaggtaggccatgcgcggccggcaaggggggagagagggaggggtttcttcttcgactgccgtacgggtactgcgcgccgcggcgagtggagtggcgctcgactcgctctctgacactggtcgccgctcctctgacttgacgacgatcgcaagtgtggcgttgtaccgaaaaaaacggaaagcgttgattttttagtcccgcgcgcgcaaacgctgcgattgattagactctatttggcaggtttattggttttcacggtatgcccaatagtagaacttagaatgcttcgcaaaatgacaatagtatttaaaagggtatgtgatgtggtgctgtttcatattgacgcgaagggagcttttgttcccaccccgcacggtaccactctggtataaaacgggcgataccgaaagcggcgtacacaaggttcgtgctcgcttggggcggaaattggggccacgtctcaagcgtactgtgtagctgctgaacggcggcgcggtctcgaagccgtacaaagagattttatcacagctcttgctgtgaacatcgcaagttgccgttgcgaacgccaagcgagctgtgagccgcggagcttgatcattgttgtcgagaggtacagtaggtaatgcgcacggcacactaacgtaagtgcatgaccatcaggaacacccactgttgcgaccacagcagcccacgtggctctaacttcgcgagggagttgcgaccgtcgcgtttgaagcgagacaaggcggttgctgctgtccttgttttggtttcatctgtctggcgaaagaggacgcctccggatgctatagacgcctgcagcgctgtagttatattgacgaccgagacaatggcggcgatacttgttcgaaaatgagcactaccatatttacgcgttgagcaattgcaccgccggcggaagcagtgtttgttgtccacacgcgagctgcagtcgacagatgtgccgggctctggctctgacgagcatacattgaagttgatatttagtcgagagacggcgtttaacttatcaaagccctcgcgcacgatacttaccgagattccacgccatgaatcgctttgagaagtaaaaccgctatggtggcgctaatttcggtgtcctcgataaaccaacaacttcgcttaccactgtagcgtcgagagtgacacctatgtgttgtaaagagtaaacaatattttacgggtttgttagagccaaaaagtcattcgctaatataaattatctgcgattttccgttgatgcagttatgcgcacgttttggaaatgtgtcataaaatgtatcaagttggttgtatcctcacaaaatttagcattttgggtcagctggacagtgcacccaaaagtcaactcagcgtctccgcttgaaattgcatcctgaagccccgacagcatttgagttgcaggtcacagcatggtactcgactcaatccacgttcatccgcaggcgctttaatatctgtctggtttggagatcctgggctcgttacgcagaggcgcagtgacgtgcgcaatgctaaacctgacaccaggtgatcgctcgcctaaaccctcggcgctcagcgaatggctacgctttgtccgcgtttgcagcggctcccatggagctagtcgcagctgcattctcttcgggtggcaaaatatcctcacttcaactccggcacgcgggttcctggcgccgtggcaacgagatgccctactttatacatgtagagctatgggtggactggtacgctgcaaccgccactcgattcctcggctcactgagcgatgcaaatcagcggcaacgtcctatcctacgtcgagtcagcgcggatcaccacgtccagcgtgcaacggcaacaacggtccgacgatgcgtttcgtccgtcgaagcggcaattcagtgtgcaccacacgatgtatccatttcgcgatttgatccgttcgaccgatggaggccgaggccaaggcgctgctcgaggagctccgcgcggcgcaagaggagcacgcgcgcgcaatcgcagccgccaacgaggtccgtgacacactcgaccgcgcgcggaaggaatatgaagacgcgcgcgccgcggagaaggccagcgaggacgagctggcaagagcagcggaggggctggcgcgtggactccagactcttgacgttaactccaataccagcgatgtgcagtcacccgtgccccaaattgtggactcgctggtggaatgccacgccaacatcggttgctaccagtgctacttgttcctagacagccacagagacgaagagaagatggaagactcggctcaggcctttgatgttgcgcaactcggcgtccgagtgcaattcccacgtgtagaactcacgtacaggcccagcagcagtggagatgaagagggtgtggtgtggagcacggagatcgagcgcaatgtggacgtctctcagtgtgtcgtggaggagaaggaggatcactggtaccttcggcttccgattcgaccgagtgacaagcagccgcttggaggcttctcgtcgttcacgcaggtatctccggttgagttgcggcctgaaagttacgactctgtgtgttgtcggggatgtagtgcgctgttgcttggtggggaggggagtgcgcccattgagaaggttctgccgcttccgtcggccaactggatggacatgttcgacttctggggcgccggcatcggagccttcgagcacattccgcgcgatgatattcacgcgcagcggctgcgcgtgcttgtcggcgagtcgtatgtgctggtgcacggcagtgatttggttgctgaagcgactgtggcgaaccacgaggatgaagcggcggtggcgccgggggataacgcaaaggaggagcgcgagtggatgccgttggcgtgtgctgcgtgctcggagcgggttggtttgtgcagcgtcgagcagccagacactgttcgtctgcacaagcacctggtcattgcttatcggcgggtggttgatggactgaaggaggagcaaaatatcttcggcaagtacacgatcgacagcattctgagtgctaaactgctggagatggcggactcagacggtatcttccggtttgtcttgacgtcgtcaagtgacaggcatgatcacgctttggcgtgcgggaaagaagacagccaccctcctccagctcccgctgctgcatccacggaaaccactgagttgcagttgcaactactgagctgggagacgatgatcaagcagaaggaagcgagcaagtttcgtcgcgtcttgaaggtgctctatggtcctcgtcaaccgacaccggcgattccaggtctcctgccctcgcacgaagtctctttgcctcctgcaatgtgcctcgccatctcgcagcgactagcaagcagctcagagctgctaccgccttcactgcgagcatttaaccgcatgaacgtaggctacctcttcgcttaacgaggtcaaagaacccaatgccaactccacagctatccatccaaatgcaaaaacgaactgtattattcctacacgtcagcagaacgcgtcgttacccaagccacaagtggagcttacttggagggcgcccagtagtccatgatgtcgagcgccacctcgcagctctcacgcaccacctgggcgtcgtcgttcaggtactgcttgaggatctcctcgcactcggtggtgccaatggcgcccagcgcctcggcggcctcgtgacgcaccatgcggtgctcgttctcgtccagcagcaccttcttgagcgccggcacggtcacggggttctccatctggcccatgacgtaggccacctcgtgcttgaacagcgcgttcgggtcggcgaaggcctcggccagcgccagcgccgcctcctccgtgttgcggttgcgcagcgagaacatggcgcggtacttggcgaacatgtcgccgtcgtggtccagcagcacctggcgcagctccgccgtggacttggtcttctcggccgcgggggccgggtcctcggacaggtacgggttgcggtccaccgctccctcgacaatctcgcccttggccttggccagcttgtacttgaccaggctggccgccagcttgcacgtgtccgagacctcgggcgccgcgtcggcgctgtacttctccagcacgggcagcgactgcgcggcgccgatggcgcccagggcctcggccgcctcgtggcgcaccatgccgtcgtccgactcgtcctccagcacctggtgcagcgtgtcgcaggcctcctcgcgctggaactggccgatgacgtaggccagctcatggcgcatgagctccgagtccttgcggttcagcagcgccgtgagcagcacctgcaggtcctcgaggccgccgcgcgagcgcaggtagaagatggcgcgcgtgcgcttgcccacgggctccgacaggtccagcagcgcgtcgcgcaggcgctcgaagctgggcgtcgtgtccacgacgggcgcagccgcgagcgtctcggtcacggcggagtgcgacggcatctccttcggtggaccttttgatgcgcaaagtctgggaatgaaatggcgacgtcaggactggccgccagtcaaaaagagttcaagaaaaatgcggtaagaaaatgtgtatgagtgaccttttagaaaaagtatagtaccgtggaccaatgagaatggagaatggatgtgattggcttaaaaactaaaatggatactaagtgcagttggtgcacttctacgttgaagtggttgtgcagcgtgccgggatctacagtatctacggtgcatttacgaggaagcctccttcgctgccgatggagcttgccttccttcctctgcatgtggtttaatgctaatccgttgggtctaatgggtatgaggatcggcaatccgtggtcgaagcggcacgagcggcacatttaagtgcgggggctctcaaaataaccgtccaaactgtgcagtcggcattagcgcacttgccgccgttcggagtgcagtatctacctttaacgatgacctcctcgtcgctgcgcatctcgctcggcagcaagcggcacgcgctgggcgactcgtgcatcgacctgtatgccgagcgggtcatgatcccgcggatctcgctcctgtcgctgctggccggcttgtcggcgctgtcggtgctgctcgtccggcaccgtcggcggcgacggctgcaacgcgtccggcagtcggccaagctgctgccggagaaggtcgtgctcgagtcgtcgctcgtgtcggacgacggcgacgagctctcgtctcggaagcgctggttcgcgtgcttcctggccacgagcgtggcgtgggtcaccgtcttcctctgcaccttcaactcgtccacggccctcgcgtccacgtccatgagcgcggcacaggcgcggccccgcatcgtcttcagcttcacgacgacgcccagaggcatcgacgacatgcagcccacggtggacgcgctcgtgcgccaggagggcgacggcttcgacgccgtgtacgtcatcgtgcccaaaacgtaccgcgaccaggccgtgcagatccccgagtggctgctggacggccgcaccaagctcaaccagagcgagttccgcggcatcacgttcgccacgggggcgagtccgtaccacgacaagctccggctcatcgtgctggacacggacttcggcccggccagcaaggtgctgggcacgctgctggtggagcaggacccggacaccgtcatcgtgtacggcgacgacgaccgcatctaccccacgcagctgtgcgagcgagcgctgcactacacgcacaagtacccggacgacgccatcgcggtgctgggcggctggatctcggccgaggacgatctgtactgtggacgcagcctcgcggtcggggtcaacagcgtgtcgttcgtgggaggggcgggtggagtcgcagtgaagcgcaagttcttcggcctggaggaggcgacgatgtcggccttcgaggtggccaacatgtccaaggcctgcttcctgggggatgactactatctgtcgcacctgttgagtcggaatggagttagaagacgacttgtatcggacagctgctggaacattgagtcactgacagagtcgttctcgcacgggggactgtcgtacgcgccgtcggaacacccgggaggggccaacgtggagcactatcagcagtgcattcgagaactgggcaagggccaggacctttctagcgacggtgagttcgggtccgctttcatgttcgtgttttcacatgcgtgggggttattccggggattgcaaagtttctgcttcgggggtgaattcgtggcgtgctaaaaagcacgataacgtttagcaattggaagaggataattatgcaatacttcacgacagtcggtcttttagcaagtttgggtggcaatcggaaagatcgcgctcgtagtttagaaagatgtcatgaccgcgacacccacagtattcttgtgaaatgcctttggccacactgcgtcacaaactctaaaccatttccgcgaaagcttgtttctaacagaatggaaacaggaagaacgaacgccaccaagaaattctgttccacggcgatatacccctagacgtagcgttgccgtattgaagagggtcttggcgttgcaagctcgaccaggacgccgacatactgtacagctgtactcatttacgtagccacagcacgcattctcattgttcatccgtgaaagtgaaaagtcgactctcatattatgaccacgataggatgctgagtgcccactagatttgaatccatggatacgtacatgagaagaaaaacaattgccagcaaagttactatttttaatacatgtaccagcgggcggcaacttgctccagttcgctcaggtaaatgtgcgaattcactaagacgagcttcagcttctgggtctccggcgacgaccccctctctcaaggcactacactgtacattgcactgttcttcgaccagtgctgaacgttcgcatccggtgatgaccgagtatgtcgccgtcgcttgtattatagctacagatcgtcgccccgctcacgattacggctgcggcgattgcgtatggagctcgacttgattagtaaagcttcatgccggcgacttatgtatcgcttggctccgacgctgacaactcgtggcaaccctctcattcgcaaaactcctcagcgcttcacacgtgcagcaacagcaaccaacctccaacttccgcaacgctttatcatgcctcgcattgtcatcgtcggtggcggccccgcgggtatctccgctgcccaggccctagccaaggatctcacccccaacgaccgcacggaggtggttgtctttgagaagagcaagtactactaccacgctgtcggcactccgcgcgctgtcgtggacgccgactacaccaagaagctcttcgtgccgtacgacaacgccatccccactgaggcccgatcctttgtcaagatcgagcgcgccatcgtgacgcgcatcacggccaccaacgaagtcgagtacacgcccattggccacgacgatgaaatggtcgcgggtcccgtcaagcgccttgcctatgactacctcgttgtggccacgggtagcacgtacacggtgcccctgaagcagcccaaggacgacttcaagcgctccacgaccgagtttatgatggcggaggtgcgccagcagatcgagaacgcccagaacatcctcgtcgtgggcggcggcgcgactggagctagcgtggctggcgagatcaagtccaagttccctggtaagaaggtaacgctcattgagggcaaggaaaagctgatgggcggcgagaatgtgcgcgagaagttccgcgtgcgtctgctcaagttcctgaagcgtctgaacgtcgaggtggtgctgggtgaacgtctgacggagcgaatcaacggcaacaactacgagcgacgcacgctgcgcaccaacaagggccgcgagctcgtgtcggacattcagctgttgtgtggcggcttcagccccgcaacggagctgatcaaggagctcgacgagagcctcgtgacccctcagggtctcatcaaggtgaacaccaagctgcagctcgacaacgcgcgctactcgaacatctacgcgctgggcgacgcgaacaacaactcagcgcccaagcacatgctgttcgccagccagcagggcacgcacctcggcaaggagctcgcgctcgtagcgcgcaagacgcagacgaacgtgagcaaggacttccccaaggtggaggcggtacctgccatggtgccgctgggcgttgagtcgagtggcacggtctccgttggcgatacaccagtcagcgaaccatacagacagtggccgccgttgaaggtggcgctgcagagtcatctccaaacttcagttctctcccaccgacactaacgcgattcccgtgtgcccgacgtgcattaaccagatacctccagaccgaatcaacgttaacggtatccccgaccttccgccctcaacacctacacgcaccaggaagaatcaatctttcaatcaatctttaactcaagatgcagctcttcatccgctcggtgcgtggactgccatgcttcagcaattgcatccaagcgttagcattctaacggcttcgtgtgcgggtgcaggacgccgggcgcacgctgaccgtcgcggtcgagagccccaaggccaaggtgggcgagctgctgtcgctcgtggaggccaaggagcgcagtgtgcgcacgcagggctacctgaactacggcggtgtgccgctgcgcgcgtcgcggtcgctcacggactacggcatccagaaccacgccacgctggatttgtcgcggcggctgcacggcggctgcttcggcttctccatcctgctctggatcatcatcttcatctgctgcctcatcagcgtctgcacgtgcgggctgtcgctgcccgtggcgctgtgtctcctgccgccggcgctgctgctgccgctctgctgtctataaagcgaagcgagcaatagactcacagacacagggggagcgctttgtagacggacggacgctgcaggcacagaccacaccagaacttgtagaaaaccgcgtggcttgcagcgtcccgatacgcgtccatactcagcagataactatcaaccttcgccccgcaacattagggcagaacaagcgtctcaacaacagtaaaaagcaaaataaaaagtcatgtcgtcttcgtcttcaggtgcacaccccactacaaccagcagcaggccttatctgtcctctctcggctccgcagccaaaggttcaagggtctcagcagcagggagagcctggcatcacttcagatgctcatagctcctgctcaagacatcgtccaaggccccaaaaccacgcatcttgcagcacggcagcagctctgtcggcctgcagctaacgccgcctgaaaactccgctccttgaggtcgattatttacttgcgcgcggccgggcgcctgccgcctcctccggccttgcggcccgcgcccttgccccccttcttcttcttctgctcctcgttcttctggctcaaggcctgcaccttgcccagcagcggcgagttcttgaggatgtccggcaggatcacgagcttgatctgcgagccgcgcacgtacacgagctcgagcttggacttctggccgtcgcgcgccgtgagcaccacgtcgctcagctggcagttcatgctgtcctcgctctccgccaggtggccgcggtacacctcgccgttcttgagctccacggtcacggtgcggccctcgccctcgtgcagcagcgagatcggcacccccacgctcttggacatggctgcgcagtgtagtgtactgggactgttgttggaagccgctggctgagctcgagaccgaggaaaacctagagaaacagccaatcgttgatggagctgaggagttgtagcttatcatacaactacctattctcgagtggattgatatcatagggacacaaaaccggtgataaatcagtagaatgatgctatctttccgctacgattttataggtagataaagaaattaagacagtgaatggtacagcgtaccaaatgacgaagttgcttgagagaagttgaagtcgaaatgttgcggaaacattgcgtgcgtctaccaccatccgccctggttgctttcgacattggaaggggcgagagaggggcaaggcgacgaatgcgtgggatcgctagtagttgtaagtctctagctggggcaatacagcttgtaccgagtcggaacggctcggaccgttccaactctgcgtgggcgacgatgagtgtggccgcgggcgagaagtagtgggccgtggaccgggttgtctcgaaggtggagacccgtgggccgctacccagaggtaccttggagggatgatgtgcctcgcagtgtcgtggcgggacttcggggacggatggcatgttgggcggctttgagggccgtcaaggtggacggatcaagtctttgggaggggtgagcgggaacggagtcacccgaaggaactgaaacgcaaggatttgcagaggtagagaggaagagttaggagtagaaggaaggtcagtcgtgaattttgcttaaaaggaccacacaggtcgtgaggaacacttattgcattttgcttagtgatctccttgctatttgtgccccataaacctataagcacaggcagcacttactactccaatacagcggcggccggccccaaaccggtccgacaaagcgactcgcgacacgtggtggagacgcagggtagtgttgccgactgtggagtgaacagtgctgagagcctgtgcccggaagtgaatagagtcaagagccgagcgtctggacctggtgactggacgtgtgacccccctcctcgtgtttaaagtgtgccagggaaggacccaggagtccgcacacgagtacacgccgcgcgggaaaagcgaggtcgaggagcagtgagaggagcgatccaggccggtaggacaagggaacggtaacgtagacacaagagccaagtgtgcacggtcaagagcaagaggtcaagtgaacaaggaacggtaaactgagagtggacaaggaacggtaaactgagaagagaagatgccaggaggacaaggaggaagaggcggtaacgctgaggaagcaacacgccgccgggctgaacaagacgaaagagcgcgtgcagagcgcgccgaggcagagcgtgccgcgcgggccgaagcagagcgtgccaagcagagcgtgccgaaagacgtcggcagaggccctcgacaccggcttccgggacgccgatgatcgggatagcgacgccgccgtcccagcgaccgagggccccgccgccgcccagccaggctggagcgggcgcgccggacccggttgaagagggattgaggagtctggagcggtggaggaagaccgctgagtatgctgaagagggagcgtccgtgtcggatgtgatgcgtgagctccgggaagatgaagaagacgaggactatgaagagaaggaggcggtcaagacggagaccgcgacaggagtccagccggtgacctcggctggaatgaagacggagaccgtggcggaggccaaggcggagcccgccgtgaagggcgagccggagccaccggtctcgagtccgatgggacggtcgagtgtggggcagccctacgctcagccgacggactatgggtacggctacgggatgtacgccgacgacgaggaagactaccacgacgcgatggaggagccggtcccgacgcagcgaggcccgagtgggctcatcacccgcttcacaggtcccgaggcccgccgaacggatcgccctgcctttggatggagctggagcgctcaacatggttcggggaaggcccccgagtatggaggatggagtgggagcggaagcgcggtgaagtcgccgaccaagtcgccccctccgatgaagaagttgcagttcgccggcggtccggctgggctctcgaagccgctcggtggcggaatgcccatgcaacctacaacgggccctacggcaagtcggacgcctggaacgggtacggctccgccggctccgacggctgcaccgtcgacgagttggcgcggtgccagtaaactttcgccgagtgcctacaacctgtctacgatggtctcgcacgccgtgaaggtgctgccgatgttccattcggacacggccacggtggagaaggcgcgggacttctgggagctcttcgaggaccacacggatggtttctccgaccggtccagattgctggtgttccgtcagaagctgcgaggccgcgaggctgaccggtggtggaacaactcgaggatcaagtcgttcaggacgctcaaggtgcggttccataaccagttcctcagccggacggctgacgagctgtgggagctgctagagaacacgaacaggcagcgcggagagtccgtggaggagtggggtgaccgagtctcggacctgtgcgagtccctcgactacccgaatccgcagatgcggtaccagctcttccgccgaggactgcggaacaagcgcatgctggcgaccttggacgcgagtcccgcgtcggacattccggaggtgtgcgagtggctcatgttcaaggacatgcaccgtccgatcgaggaggacgatgagttctcggacagcgagtccaagaagaagaacaagaagtcggaggaggcctccgcgacgactgcggtcgaggccctcgctgagcagatgaagtcgttcatggagcagcaacaacagtggcaacagcaacttatgcagcgccagtggcagccgcctaggtcgcctcgcaatcgagcgccggtagtggccgccacccttgccactcagcccgctggaaacggtcgtgggccagggaacgctcagctattccggggcattcggatgggcgatgatagtcgcacgcaggacggttcgcctgtgtgtagtcgctgtaacttcatgggacatggtcgcgctacatgcaagcgcgcgtcgatgagctgcaggcgctgtggcgcgtttggtcatatcgcggtcgagtgtgacaggccccagaacggtggaggccagactgcagccgctgggggtactcaagctccgtctggttgtgttttctgccaagacgcgagccactccgtgatgcagtgccccgtgttggccgcgcttcgtgatgcgactccgagtttgctgaacgcggccgcccagagcaatccgacccctcgacagtgacgggggcgggaggaaggagaggagggagccactcctttctctagtctagaggatgactcagggggtgatcgtaggaggcaggcgagacgaaggcgttctgcggtcacggcgaggaaaacggtggacaaggttgtgaagagtagtgtgaatgaagggagcgtcgaagaggaacgcgtagaggcgccaagagcggaagtggaagttaagacggttgccggggcccgggaagagtggattgtacccagcggcgtctccgtcgaagaagaatatgaacgagagcaggggcggacggtgttgtccgtgcgggaagaaggtgaagctgagtgctggacggaggtgtctgtgcacggcgaaaatgaggaaagcgtggcggaagagcctgcatactgctacgaggaagaagcggcgtgggccgttgcgagtgacgaggaggagaagatgtaccctgcggggaagacggcgaccgaggagagcgccgagcaggacgagccgagtgcaagggtgaacggggcgtgggcccatgatggggccgccctcgatggtaacgatgaagagactaaggaggccgaggcggccaagctggacgcccccgcgggcgatggagaccccgcgagtggcccagaccgcagccccgagcgtggagtaggcaacgaagaggggacggcggctgagaccgtcgactcggcgtacgacgaggaccagtccgtgaggtcggaggagccggcgtactccgaggaggaggaagtcgacggtgatgtgttctatgcggccagtgcggacgatgaagcgttctgtgctgcgcctccgagcgcgaacataccctacaaggtgcccacggaggagttgccgccgccgacggagttgagagcggtgccgaggtcagtgactgcggcccctctgcgaagcatcctgaagaaggaaggcccccgtccgcgttggatgacggaggagccctccttcgaagggtggggcggcgctgtatatgtgggacacacactgttcgccgagtggaacgacgacggaggatcgccggccggcgagcacatcgccgaggagaacgtcaacgtagtcgtagggccagagccggtggcagggtccgccaccgagttggctgtcgccgaggaggaccgaggcgctgccgccgagagcaaggaagtgcccgagagttccgaggtggtcgaggcggccgaggacgttaaggagccgtcccgccacgctcgtctcttcacggacgaggagctggacgccatggagtgcgaggcgccaaaaccctccgttccaggcatcagtaaggagctcgaggagtatgacaaggagctggaggacaggctccaccccctcgatgaagtggaggtgatgcgcaaggtgaaggagaatgcggagagggccacgggcccgtccatggaagagatgtcgaagtttctgggcgtcccggtcgaggcgctgaccaagatgaaggacgcctcgcccgagggcacgtcgtcgcccgagtactgggaggactggtacaggaacacactggagaactcggcggaggccaagcgagccaaccgtgacttcaaacagtcactggccagctgcgtctctctagaacgcttgaccgaggagacaacgtatgagtcgttcggcctgtcggagtccgacctggacccgaaggcgtcgaccgtctcggtcgatggctccgtgatggaggagagagtgactgcgaacattgcggtccccgtggatgtctgtgaggagaacagcgaggagatggtcactgcggtaagcgtgaacccgcccgtggacgctcctgaaccgagttcgagcgcttctccgagcgagaggtcggaggctcgcaaggtcgtgtacttcttgctgaaggagaccaaggacgagctgttgcgtgcgaagaagtcggtcgtcgacccgctcggagaaggcggcacggtcgagatccccccgattcgtgataagccacctgatctagactgggtgcgcctcgtgcacgatgttgagcaagttgctggtgaaaatgaagaccaaatcgactggcgagaacctatgaagaaatggacgaacgagtactacaatgagaacgctacgtatatttggaataagctactagatcgagttcgagaagcccactcggcgagtgcgaagcgtcggctgcggcgtcgctcgcggcggcccgtatgctttgacttcacggcgttgtaccgcgattcggccgaggcgctggacggggagctccgtcctgaagaagacgacgacgcgacgcactacgtgcaagtggtccgtcccgagcgtccaccgccggagcgtggacggaagaccgggattgtggaggtggtaaccgtgaacttgccggacggcttcggcgtccgtgccgatgaggacgatgatgagtgtggagccgagctcccacgcgtagttgccggtggtcggcgtgtggtgtgcactgtggggaacttcgaggcgctgtcgtgcgggtacatcgactgcctgccttcgcagatgttggcggacacgggcgcaacgctcagtctcgtcgacttccgtgttctgaagcgtctgggccgagccggtgaagctctggaggcctacgacgggcatgtacgcagttcgtctggacaccgtctgcgcattcgggggtggatcactctccccctaatgctgggcaaggtcggggtgaccatgcggatgctcgtgatcgacaagttgcaagtggacgctatcttgggcgtcgacgcgctgggcgcgttcggagcagtgattgacgtggctgagcggacgctcatgctgaagagcacgggcgaagtcttatcgttgggcgtgatggtggtccacgaatcgttcatggccacgatggccgtgtccgtccgcttgccgccaaggggccaggccctggtggtcacggatgtggtgggcgatgccccgaacgcgaccgtcctcgtcgagggctctctcaacttgccgccttcgctttgcgtggcgagaacgctctgtactgtggacgacggtcgagtcgttgtggaggtctgcaacgcatcgacagaagagttctggatcaagaagggcacggtggtggcctcgacgtccgtggtgcccgagtcggcgttcggctttgagcagccgtcggcggagaagtccgaagaatcgccctgccgtccgcccgagactagcggggtggccaccgttgctgccagtcgtgaagaagaggcaaatgggccggatctcggcgagactgtgagggcgtcgaggcccgatgtgccgcccgacaaggaggtggcgctcgaggccgacttctcccagtcgaggctgtcggatgagcagaagtcgctgttccgcagcgagctggagcgcttccgagacatgttcgtggagtcgtccaactcgcccggcaggaccgacttgctgaagatccagattgatactggggacagcaagccgatcaagcagcagccctaccgcgtgtcgttcgccgagggcgaggtgatggaggcggagatccagcagtaccagaagctgggcttcgtccggccctcgaagagcccctgggccagccccgtgttgatgatcaggaagcccgacgggggcatccgtttctgcatcgattatcgcaagttgaacgccgtaacggtcaaagattgctatcctatgccgctgattgatggcatcctggacgtgctgagtggagccaaactgttctcgaccatggacatcgcctcaggctactggaacgtgcccatgcatgtagacagtattgctaaaacggctttcacatgcaaatacggtctattcgaatggttagtcatgccctttggcctatgcaatgctgtacctgctttcgaacggttgatggagaccgtgcttgtcgacctcaagtggcgcgtgtgcttggtgtacttggacgactgcgtcatcttcagcgaggacttcccgtcgcacctcgttcgccttcggcaagtgctgacccgctttcaacaggccggcttcaaactgaagatgaagaaatgccactggggcaggagtcaggtcgcctttctcgggcacattgtgacacccatgggcatcctcccgaaccccgagaaggtgaaggccgtcatgaacgtgcagaggccgcgcgatgggcatgatatccgttcatttttggggctgacgagctacttccgccggtatatcccggggtacgctctgatctctacgccgctggaacgcctgaaaatgaaagacactccgttcgtctggaacgaggactgtgaggtggcgttccgccagctgaaaagggcgccagtcactcctcctatcctagtctacccggacatgaataaacgattcaagctttacgtcgactcgtcgaggtatgctgtcggtgcttgtcaaatgcaggtggtggacggtcgagaccgtgctgtcgcctatgctagcaagttactgacaggctctcagaagaactggatcaacaaccaagacggaatctctgaaattgaatgctggggcattgtctggtctacgcggaagttccgctgctacctagataagcgagagtttgatctctacactgaccatcaggcgcttacctggatcttcagtcctggcaaccgcacgaccaatgctaagctcgctcgctgagcgatcgagctgtccaatctacaattccgagtgcatcacaagcccgggactgctgaacccggggggggggggctcgcctgtgggcatggccgacttgctgaatccgggcgactcgcccgagaccgtggtcaacgactcagtcggggagccgtccaacgtggcgctcgaaccgatgactagagacggcggcggcgagatgggcacggagaccgcggttccgttgccggaagacgctactgaggacgagtccgcgccgacggacgtccctccgtcgtccgtggacttgttcggactcgatatggaacagttgaaggtggagcagcggaagatcccgtgggtgatggccctgatcgcgttcctgacgggtggagcgctgccgctggaccctagcttacgagtgaaggttgtgaggatcgcgtccaagttcgccgtcgagaaggagctgttgatgcgcagagtgaatctccccgcgcgcgtcgggcccgctcgatcgctgatcgtgcccgtgataccgcttccgttcgttgaaacagtcttacatttttctcacgctgatctactgtcgtcgcacctcggcctcacgaagacgcttgagaaggtgaggcgacacgcgtactggccagagtggcgacaggacgtcgaggagtatttgcgcgaatgtgataagtgcggaagtggcaagggtgcgcgtccgtggcgcgctggtcgaatgcagggaatgcccatcgtggatctgacggggccgttctcgttgctcatggtggacgccgtggggcctctgcccgaaaccgagcgtggcaatcgctatattttagttttcgttgattacttcactcactgggccgaggcgttcgccgtggagcgcttggactccatgacgttcgtggaggtgacggtgaacggagtggtgtctcggcacggagtgccgtcgtggttgctgagcgacaacggctcgaacttcgcgtctgaggtggccaagttcttctatcagacgttgggcattaagaaactcgttggtgctgcctaccaccctcagactcaaggactcgtcaagaagattcaacggaacgctcataggaatgctacgaatgcatgtgagtgaggctcaagatgattgggacacttatcttcctagagtgctttttgcctacaggacggcctaccacgaggccctgggagattcgccgtttttctcgctgtacgggcgcgacccagtgcttccgatggacgtggcgttactcaatcttggcaagaagtggcggagtgatgaattggctcagtataggcgagagctgtacggctctcgccgttcctcgcgacatttggttaagcgtcagttgttgaaggcgcaagatcggcacgagcagcgcctggaagggcaagtcgaagtgaattatgaaataggagacccggtgtgggtctaccaggtgttcagggcgaaacgcggcgaagtgcgcacgaagaagcttgccttcgcttggcacggtccctatcggatcgtagccaaggtcggcgagaacgcttatcgggtcgacatcccgactcaccctaacaaaacggtgaccgtgaacgtgaataggctcaaaaggtatcgtggcaagtggacccggccttatatggatgaagcgcccgagggtctgggcactagtgatgaaaacgaagaagaggggccgttggaagaggccgacctccctgcgtcgagctacgcggaacggttgacactaggaaatgaggacactgttattgtgggcgtggaagcccccatcgtggaaatagtggcgaagatgaaggacggtcagggcgtgaagtacctgacgatgaccagctcgtatgaggtgttctggctgcccagggaggttttgatgcccgagtatgcgtcgttggtgaccgcttttgagcaagcggatatgaggaagaaggggttgccggagcttcgtcgaagtgcgcgtttggcggacgctaacgcccaagtcgatgatgactatttgctgctggcgtagttggtgatgttcttgagctgaagaacctgtgattgtggatatggatttacgagcagctcaagaatggtggatacgcatgtcaagttcatgtttttatttggttttacctgcaaaattagtgctgcggctgcactagactcgactacaacgaaatgaagaagataaacggagatccgaggtgtgcgcatgactcacttggccttgtcgacgcttgcggaacgcgacttgagcatcttggtcggaggctcgctcgctacctcgccgtcgtcgtctgcttcgtcgcccggcagggtctctttggccgcgacgggggccttggtggtcttgggttgggccttgtcgtccttgtcgctgtcgtccttggctgccggcttcttcttgtcgtcgctggagtcttcggactcgcctgacttgctggagcgagaaaccggaactcctggcttggacggagtggtagctcgctatttgacggcgggagcccggtactgcaccgggggcgtcggaggcaacgccgtgaaggctccgtcctcgatctcgaagtccgagtcatcgtcgccctgctcgtcggggttgaagggcttctggtcgtacacggccaccttcatgcccaagtccacgagctcgaccacctcctcgatggtgtctttgagcgacgcgtccgacaagagggccttccacgggccgcgggttcggttgccaacccaagaaggcacggggggtggcccgctggtgacgtcgagcttgatgcgagcgagagccttgtcggagagtcgcaggtgtggcgctcgcgtggggtcgatgagctccgcctccacgaggagctccggaatcgaggcgtagccgtgttcgtcgacgatgttggggtcgagagctcgctcgatggcccgctcgtagagaatcttgtcctttgcgaagacaacgccgaggtcctcgtgcgccgcgcccttgctcttagccgcgccggtagagtgcttggccgctctgcctcccaaccacatgagcgtgtcatgagcaccgttctcgaagtcgtcgagaaagccgaagtaccctcgctcctcaatgttgtagctaatgagctcgttccgcgctcggcacgcattcattttctccttgcgccgctggtcggcattccgacaaggcgcgtacagcgcccacaggaaaaacagctcgcggaagcgcatgttggcacggtagtggacgaggtgcaactcgggatactcggatggcgggtaccagcaccgctgtttgcgtcaggggtacgccaagcggaacggaacgaggcccttgctgaaggcgcgctgcgcaagtgcggccaggtcgatcttcagtcgcgcgggcgccgtcgtcggcaaccggaagtcgtaggcctcggccttcttcttggccgcggccttctgtttcttcttcgatggcggtctcgtcttggaagacgtccgtggcgacgatctgccccctgtcgatggacgcggtggcggtgacgtcgactctggcgtgggcaccaacggcggcagcgggatcgacaggacggagtgctcggcaggctcgccggcctgcatctggtcggggtgcggcaggatcacgaggatctggttcaggcggcgtgcgtcgccacccgacaggacgtccatggccatggcgtccaggacgtctagcccctgggacgcattgtcgacggagagacgggtccggaggcgcgcccaaaactcgcgctgcgcgatgaagacgtccccctcgtcgtcgagctcgagggccatgtccaggctgcccacctggttgtcgaagtcggtgacgtcggagttggtcttcttgaccatgacggacgcgaggcgaggcgaggcctgggagagagcggagagatgcttggtgactgcggagtgcgcggcccggtgaaaattgtggaatgaggcaactttcagtggggcggctacggcaacttctgattaccacgtgacttcaagtaaattgacgaaatgtgactcaccttgtggatggctgcgaccgtctgaaagagacgcccaactggctggtcactttcgaagaacccgcgagcgacgctggtgaccactggcagtaacggggccttggctgccctgcgcctctgcaggtcgatggtgaccgccaagggctgccgctagtggcgcgcgcggacggtccggacggcgtcgaagtggccgtcattatgaattagtgctgctggaacgatggagtgggcgacggacgtggtgaacggcctggcggcaatagtggtggtcgctgctgaggcagcttgtcaagttgcagtggagcgtcgctgggagctggcgtggctccctgctggagcagtgtcgtggacggttacgggccccctgcgaagcatcggctcacggatcgccgctgcgttcatcgacttcgccctgaagtggagcgtgctggccaagttatgcgtcatgcgctactgcaggtatgtccgtgggcctgccgtgcaaatgcagccgctccgaactcgcgtgtggaagggttacgagaccctgctggccaccccgttggttgtgctggagtccaagggagagcatgaagacgggctgggaaggttgctctacaagtggcttgacgccctccacgagtggtggtgcgtcttcttgcctgagacttgggcgtcgggacggaaggcgtgctccaagtactgcacgggcgcgagtctagagtctggccgttcggtcgcccgtgccaagcttgtcgccaaggtggtatggacgctgacgtccctgatcctgttctcggcgttctacgccgcgcggttcacctacgaagtcgtcgagtggatctgccagggcgtggccggcttgttcgctgtagtcgtggtctttgattgctggttcgcctccgaggagggcgagcatgcactagtgacaaactactggttgctggtggtgaatgtttgggttgcgctggtatgcataaccagtaagttgtggaggttgtacgaggcgtcggcgggcgagcgttcgccgctgactatggccacggagggctacgctgcgtggtgcgcggctctcgaggagcaggagcaggctgagcgtctaagtgaggcattttggaggatggacggcgggggcaatgcgccgagagtgcaggtgcggacgcgaagtggattgcaggccgaacggagggcctggcaagtaaggagagaagtggatcaagctgcgtgcgctcggcgaggacgccgagatgcagtcggggaggatgtcccgagtcggaacggctcggaccgttccaactctgcgtgggcgacgatgagggcctgaggtcgtccccctgctgtggccgcgggcgagaagtagtgggccgtggaccaggttgtctcgaaggtggagacccgtgggccgctacccagaggtatcttggagggatgatgtgcctcgcagtgtcgtggcgggacttcggggacggatggcatgttgggcgactttgagggccgtcaaggtgaacggatcaagtctttgggaggggtgagcgggaacggggtcacccgaaggaactgaaacgcaaggatctgcagaggtagagaggaagagttaggagtagaaggaaggtcagtcgtgaatattgcttaaaaggaccacacaggtcgtaaggaacacttattgcattttgcttagtgatctccttgctatttgtgccccataaacctataagcacaggcagcacttactactccaatacagcggcggccggccccaaaccggttcgacaaagcgactcgcgacaagctcaccattgtttatagcctgcctcaaacttagacgaggactcgaaatagcgaactactctggacacacaaagcacttcaaacccactgaaggcctcgacacgagcgagtgagaacccccatccatggccccttctgcattcgcgatgagcccgatccgagccaagtcaccgattgaccctcttaccatcggtgctactcgacggcgacgaaaagagacggtcaacgagcgtgtcgagcacattctgagaggagcactacgcgacgcagaggaggaagcgctgcaggagcgggaaggcgaccctgaaacgcgagggcgcgcgttgcagcgctctcatcagcttgcgtcactgtacacaacttcaacagaaaataaatttctacgcgctcgggcgaaagacgctgcactgactcggcatcgtattgaggcagaagactcagaagactgcgaaattcagtcgaagacgagagtagcgagtacaattggagaaggcgacgaaaacgacgagagcgatggcgaatcttcagcttgtcgaatggtgttagcgtcccctataaagtccatcagcgatggcgtatccagatctcccatctcaattgttacgtcgacggtcaagccggcgaagccatggtacggctgcagtcccgccgccactttaaaagagcagatccctttgggcatcacattggacgctaaactgcgccgctacggggcgcgaggtacagcgaagttgcagcacggctggaggtctcaggaagcgctagagcccttgtctcctaaccaccccatcgttcctgttgacgagttcgtgtcggggcttagtggttcgccgtcgctctggccacccgaagcatttcacccgactggatcccgtctacccgtgaggatgacgcgctgtccttcatctccaatcgcagtttctgttgaaatcctcagcgtagataacgagccatgtcaactccattcatcagtacaggaaaagctccaacaaaagtcaacacaaaagctgcaaactctctacaaacaagagaaacggatcgccttggagacacaagcgcaaaaccagcgagacataactgaatggcaaagccgaacgctgcatttccagccttcgtcggagctagcagcgcatcgaaagcagcaggaaagtgatccacagctccgtcatcgacgtacacaggtctcagctattgtgcagaccccggggtattcacccgagaagcaacggagtcaagagtctaacgagctcaagaagaagaggttcccgcttcgatggcgctcgttcgctaaattgctggacgcaatgcgccggactccctgtcgacgaccggtgctgcaggatatggagaaattgttcgctttggctcgagagttgggggctctcaatgcactgggcacttgtatgctctctcgcgcgcagttcacgctcctagtgacgagggaattcccgtcgtgtgatctgaaatacgtcaaccgcttgttctcatcttacgactgggaactgcgcgactccgtcgacgctcgggtagttcttggcgccatacgagccatgagagtccagcagggggaaccggtagagctcatttgtgctacgctgcgtgactttgacggcactacggacatgaacggcaagagcgtggctggtgataaggctgtagtgtcggatgggggtagtctgaccaaggcgttgtcgctgtgctgcttcagcgactcggaagagaaggacatggagaatagagcggagatgatctggaccaaatccctctcgtggcagcggcaaattctatcccgacgtctgcatgggggcgctgcatacaatatttggaagacgcgaggagcttggagtagtgtaaccagcgcagtttccagcagtacgggggaactcgaagaacaggtgaacactgatgaagatggagggtgcaatggagaagacgaagaggatgtaatggaggagataccggaactcactcgccttgtggacgagtcccgcgtgcctgtacgacgtattcgagctgcacttaagagagagcgagagacgttggcgctattcacacaacaactgctgcaacgcagacacgagtgtatgatcgctgccaatactcggtcacctcgaacgtaaaatttctaaccgcttcgataccctgggatgatcattcagccccgacatgaaaacaataaagcatgaattgtgttataactttgctatgcatgaattttagtatctaggccacaggcacaaccgccgccagtttgtggtcttcgtcgcttgcagtttaccatgtgcaagattgcgcgtgtgtcagaacacccgtgctcgggtccatgccccagcgcaggaggacattgaacgtccggagaatcttcggtggcaccaccctcgcgaccacgagttgcagcgttggtcattatatgtgacgtaagcgatatcgtcgcagtcgtggaagagcttcgtgaacaaagaaccgaggcaattctgctcgaacgatgtgagctgctgcccttcaactgtaccaaactcttggcttaacacctttccagcatcgcgtcctcggggaacactcagtatcactcgagccgaactcactttgcgggctaaatacgcggtatccctcgctcttggactcattttattcgcaagttcgagacgatcagtgccacaacccccacgcccaccgatgccattatggcaatggttatcatgttgactgtgaacagaatacacgaatcgttgagtccacaatactttgtatcagacgttgacgacttgcgtagaatttgggcgttctcctcgatgatagaaaccagcggcgtgtgctgcacggacttcaagagccaccatagcggcggtgagcacgagctgcatggcctcccacgttaaacgaaaattccgatccaattgctgatccccggggcgcgctttgagcaggttgacacaggagtacgagaaggcgaagaagcaacacgaaagattcgcgatggattccagagtcaacgtgcccgtggcgagccccagccaatacaaatccgagttgtacacgaggtgatagataatctgtgcgaggtaaaccacttgcatgcgtccgttctggcagcgatacgcccatgtctgcgtcagcaaaactgaccgcttgtgtgacatcacttggtacagactcaccacgcccatgatcagtatctgagtcaccacaactccaggcaggatgttaattgcgacagtgtcggcgtagcgagttcgaaccgtgttgaggtagatggataaacggttggtgttctccgtgctaacagtgctgatcaactcccactccgtattgtagtagttgcggacgcatacaccgcccgtactgcacagcggaacattttcaggaccctgcaccatcagaccgtacgcttcccagtgctttgagacctcacaggaactctcgatgtagattccagtagtgttcacttcgcgcactcgacagccgccgtagtacgcgtgcatatagggctcaagcactgtagccacaccgtacttggtgtttgaggctgtaaccacgcgggaatgtgtaggcaagctgctcgtgaagctgtaggggaaaagcttgagcacatccggcgccatcgcgagggggtccacgccgtcggttgcgaataccaacttcgattcggtcaggttgtcgttgatccccacgtcaggtcgacactcggtgtagtccggataaaagttgatggttgcagcggagatcttgccgaattccgcagtgcccagcgtcgtgggatagtagaatagccgcgtgatccccatcatactccagttggtcacgcacttgtctgcctgttcgactgctagttgaagttctcgggtcgttgtcgatgttgagcaccgtgatgacgtcggaaacttcttgcgctgtccccgtcaagatgctggtgatcgcaccccagtcgttgatgccgctttgacacaaggcttcgtttttgtcaagcgattcgccgagagcgagagcttcggcgctcaatgagctgaaatcatacaacgactccattggggattttcccaccagcgcggaaaatctgggggtactcgtaagcgcagcctccttgaacaaggcgtacttgagcagactgatcttgcaggagctgatgcagttggtgcagcctccagccatcgacagatcctgctctgtgaaggatagaaagctgtcttcaggcttgatgaggacggtgccgtcgcttaggtatttggtggcggtaaacaacagaagcatcgcgatgggacccaggataatgcgccctgcgatagccaggcaagcggcaaagacggacggctggagtagattcttccagttttgattctcgcgacggatcccctcttagtggaagtactctgctgcccagtccggtaacttgtcttcctccgcttcatctgtcatgtccgttatgttcctaatagctcaacgcgatctcgtgaatttattagtgttcgacaactggacttccgcaatcgagatgaaaatgggagtgagagctgactcagaagcgtttatcttcgggcctccatcccacaatttgaaacaggccctctacactcgtgacgtagccgccgtctctaataagcctgcgatgtagcctacgtcaaggatctctgtcgcatttcttctcaaatagacaggctcaagcgcggtgcatcatgcaccagtgcatgcactttcgaacgaccgtttctggtgctcagtttaccaacaccacacatctcagagatgacggtgggaggctggcagccacaccacccacagttgtttatagtttttatttgagcaaactcagacaagaacagcatttattcaggatactaacgtggaatgcaacacaagatcagcaatccgcaggcaacgaatgcacgagtgagtttgagaccgaggtggagtaatttctaaaactggcagcggtatcacatcatgagagcagaatccgtgtggtctctgattacttgacccttgtttacttggtcggtaggttaccccaagggctgcttgctcaactcgttgtgtgggacgtatcactcctcgttttgcgctctactagacgcaattaaagatggtggcgccctccaagcacgcgttggtcgtcggagcctcggctggccgtggccaaagaggtggcgccgcttgtggccaagcttacgctctgctcgcgttcgtgtccgtcggatctgctggtgagtatcaaggacaagaacccaagcgtgcaggtgacgcacgagccgctggacgtttcgcaacttcacgacgtgcgcagattcacgacgaaacacgaagcgacgcagttcgactggatcgtgctcacccccggcctgctgtccatgaatggccgcaccgagacgaaggaaggactcgacgtcaatatgtgcacgcactacaacggacggttcgaggccatactatcgtattaagatgacgaaatttctccctttaccgctgtgtggagctgtgtgtttcaggttcatgctggttcacgatatgctggccagactgaatcccccagtgtgcgcgttctgaacgtgctcggcgctgtgcaaggcagcccccctgatctgaacgacctgaacctcaagcgcaccttctccattaagcgctgcgctgaggcgacaaccatgtactcgtacgtcgtcgctgttgctgctgttaccttagtgctgttgagttgacacacgttgtggatagggatttgatgacccaggccttcgctgagcgggccccggacgcctccttcatccatgcgacgccaggattcgccatggtacctccgctctctgtacaatgttgcagcgttgctggctgctcgtacgcccgagcagtgtgccaagtctatcgtctcagctgtaacctaggacgagttcacgaccggctggcacctcattaaccaagacgcgcaggaaatgcccaagaccatatatcacactgacgaactcaaggacgtcgtgtggaagcacgcgcttgaaacgatcgacggtgtcatgacgcaacactgaagcaacttttgtgttaggaagcgtagacctgcttctatcatgtaccattgatctgggagatgctgggggcgtcactgctattataacgctgactgttgatccgaagacatgataaaacgaaaatcacgactgagctgtgaagcaagacgctgaacttttcgctattgcaacaacccatcgtggtatctgccaaaacctgagattcccaaccaatcctccaaagacaagtttagattttcgtatcgttataaaaaaaataaatgtttttaacccctccagaccggagccgaaaagaacatgtaaactgcatatgcagcgtaattagacttgatgtttgtatacaaaaatggttagggaagataggatgcacgatgggggccaacaaggccgtgctaatactgaaaataacctgcatattggctccagtgtacacatatcgacggaagatatggcctgcagacagagaaaatgaacaacaaatcttcccgcgtattctatatggcttttactatgggtatgtattttttgcctgtacgaacgcatatcgcttgcacacagcactgccttttgtatgggtgtgcatacgcctttctctgtctgcaggccatatcttccgtcgatatgtgtaacatacccatgctgaataatgctacttaccacggatagtgacagggtgcccgtcaaacagaaactagggcctagcgagtcccgattttcgaaaaatcggaatttcaaaacttcccatacaaaaacttatatacaaagtaggtgtcacctctaggcgttctgtaaacatgtggcacgtccggaggcattctatgcactacagtatacaaacataaaatgaaatagacatccagaaaaatatccacggggtaatcaaatgaaacgttaccattgtgtacataagacaatacctaagatgcaagttaggatgtgtcgttgcagacagaagcatgtcattctgtagtagaagcaacaaagcagcaaggattaccaagtttgatcactaagtcaaatttcactgacttcaacaccgaagtagttcgttgcctggacccttcccaactaacaacacacactaaagcgctacacctgcattcatgcttgaggtatataatgagcggatgtagttaccacagggtttctccatgggtgcgagaagttctacagttgaatacttcaattagctgctgcttaggttgatcgatgccaaaaccatgactttgccaattcaacctacaggaaagcagcgattacaaggcgtttcgctaattgaaccataccgtgaaggcaaagttgcatctacaactatgtgtgtgggtatccaaagcctcgctatactgggaatcgcatcgactgcaattgcatttatccaaatcgcttatattagtttgcaaacgttcacgttactacctctcgccctgcccaggtgtcggctcgttcgcccatcagtcatacaatgagcaccaaagcggcatcaccggcttggccggagttcgtctcggctcgttcgtttcgctactacctcattcgagtcgtcgtcttcactcaggtgggctcgtttcgggctgatcatgactgcttggtcgccgtagtctccttcaacagcatcaatattactccggttagctcatgtagactacgatacaacatacgtataataaaatgcatacaatgcagtatacaggacagcatgatatacaacataccattgtttggagcatgccatatcgcataaactcctgccgtcgtcttcgccgcttacatcaacgcgaaaagatgtcggaagccttgagcgccggaatcctgagtgggcctctcccccaggccttcgaacgccaggtacgaatgcagcgggttgagcagtgcgaccgagcccaacagcttgtacagctgcagcagcagacgcttgcctgtaagcagcaaaaccaactggaccaagagtaatccaaagtcttgtcagcacgcatgaacctcgcagacatctcttaccaatgaccaaacttaccaaacgctagagaagcaccacacacaggagcgtgctatcatgaaggacaacacgtaccaaataaaacaggtcagcaataaggtatagcattcgttcgctatgagcgtaccgttagccccgtactcgtctcgcacgatcatccgtgatttctgttgattcttctgccaacttgagccctggccgctcaaattctcgaatgaggcggattttggaaaagcggcaaatggaagtcgctctgagccacccagtccgataccttgtagattttgttcaaaaggtcccgcgcccttgccaaacattatattccgacaaacgctggtctttgacatatggaaaaataaaaaggcgcgaacagaaactaaacgtaattttatcttgacgtttgtatagtggtgtgtcgggggaaaggacagtcatacaaatttcaactcaaaattggcttaaactgctgtggcgtagcgggatcagcaaaatctgcgagattgccaatccaacttaccaactgcgcccgaacaccgacttacgaagggggtcccccgatgatccgtgatctgtgtgctgaactggtcaccttgtgtacccgtcggtagggctggatctgctcctctggtgtctgctgaagctccgagccttgaagacagaacagtctgggcgagacgcggggatgtgggtggagcagcgcggaaatcttcactctgctcgcagtagttattcccaatccagtggtagtcgacttggatcgggcggcctggatgtggatccggccgtggggttgcctttgggttgttgttgttcctttcctttgccttcgtaggtcttcctttgccgtacttgccgcttcctatagcgggatccgtagatgttgagagttgaggccaagtagtaactccgggtggatcggggatctgcacttgcaagtaagtcactaggaaggttgcagaactgaccaatgtattatccagtcttaaccaacgctagatccactaccagaaccttgctaagccgtggggccaatgtacttcccgtttccaggcgaaggcggaggcacttgcgatgtacaaggcaatttcaacactgatttatgcttaagtccaatcccatcccaaagtcctatcttcctatggattctagcatcacatctgtacctactgactctggggcttgattacctttcctgcgtctcgcttgattgcctccgtcgagccataaccttagatccaccgctcagttccatctgagtccgaatcagaatcagatctggattggatcggatcgccgatccacttgacagctgcatctcttggatcttgggtctcgaggcatggcgttgcttgggcacacattcgtgacgtctggtcgcactcgtagtgtcttctgctacggggcccgatccgccagtctggtggatccatcgcggagtctggatccatcattctgccgaccaccctttgtcccaatttcttggatcctgcttctccacactgcatatatgcagtttaagccttcaaatctaagctgcattacgcagcatccggtttggaggggttaatatgagttccagtgatattacttgcataacattggggatttgtgtttcgaagtagcaacacatccaagatggagggggtgagggaggagctcgcagacgagctgcgcgccatagaggggagaccgaccgccttcttcatagacggcggccaggtcgacgacatgtgaaacttcctgctgcctgtgaagtatgcatgctgactcgccagagtcgcggcccgaagcgcggctgcctgcacatcgtaggatagaacagagtagatctaagccaaccattctcactgtaatgcacttgtggagggcactgccgtcgccgcacggcacttcggcttttgagcatccgtgccctcctgctcggcttctgcccagcaatctgcgccttacctgtatggttactacaaggaacagtaaatacaagctcacaggttacgaccccaatgcgggcacgggcctcaagagacgaatactaaccagacgaggcggcctcgcaaggcgagcggcgcgcagctctagcagacgagacactcatccagacgattgcagctgcggtagtgagggccttggctgcccagcctgccgctggccaagctggccctcttctcgaacagtaggcggggcagtctccgcccgctccccttcccaggccacaaagaaacttgggctctgagctcgtcgtctcagtgcccaaggacgcggtcacgccgtatggcacgcacacgaacactctggccgacccgagcacgcctcctcccagcgcatacgagagcggagctggctggctccccttcaagtcgcagcaactggtcgcaatggggggctggcaggcaggttagattcagctggcgtcgaccaagttcgacggcagggtcgagaactggagccggtggaagacggagatgcagacgatcttccactggcaggagctgctgcaactagtgcaagggcgtgagagcttcgacgaggagcgcgctcgccgcgatgagaactggaagaagtgctactagacgcgcgagcgcaaggctcacaccgagatcgtgctctcgctacacggggatctcttggaccggttcaagtccgacatcgagacggccaaccccgcgcaggtttgggccgcactgctgcgcacgtacgacggcacacggggaaccaatgcagtgtacctaaaacaggatctgtatgcgcgccgccttcgccaaggcgagggagtgacggagtacgtcggcgacttgcagcggatgcgccgcgagctcgagcgcacggagatcacgctggccgagggagagatggccagcactgtgctgtccaccgcggtggcggtctacctgtccatcgccaacgaccacacgcagcgtgtgtcccgcctgcgtggcgggtatgacaaggaccagcgcgtgcaggacgatgtcaatcttttgcttgtagctgagcgcaccagctcagccgcgggaaccgcgacgcagggcaaggagtgcaacggcaggtgaacctggtcacgcgcaacagctcgtcaggtcgtgcgcaacagcagcagagcggcaacaagcgtcgctataacggcggaggtggacgcggcagtggcaagaagaagcggcaagatgatgaggctgcgcgtaagcgccgagatgaaattgctgagaagaaacgtaacagcgaatgtaatgcatgccatcagcgtgggcattggtggaaggagtctcctgagcggaagtctactgatccaagagagattcgcaccatggctggtgctgtactgcgccgaatcgaagaggagcagaatgatgactgccctgcggatgcacagcgcgatcggcagcaggaccgcccccgtgtggattttgtggagacccaccccgtgaccctgagtgttgaacaccagcgagctgatgtgaatagctactcaaagatctacacccgccatgagctgacagcgcatgtcggccgcgactttgaggagcgccttgtccgggctcgtgacacacagcgtgaagagaagtctgttgaatattctccgacgtccccgccagatgatgatgacgaaagtttgcatgtagctactggtctgcttcccatacggcgtgtgttggtagtgagaagtggacggcacgacgcggtgcctgcaaatgaaattgagtggattttggactcgggggctcaggtcaatgtcactggcgacctggcgctacttaacaacgtcaagaacctgaagcaggcggagctgttggaaggcgccactggtggttttgaccgtgttgagattgaagatgctgtgatcatgccagttgtgaacgagcactcgggtaagactgaaacccgcttgctcgagaatgtgcgctactcgccgagcaccaaggtcaacctaatctcgcagacctacatgcagttcgagtgtggcaacaagctgactgtgtcggctgatgagctggtgacgtggctggtgaagccgacaatgcagctgaagtttgtgatgcgggacgggttgtatcgcatgcgcgtggagcgccgcaacaagctcgtactgagcgcacaaaagcagagcactgactcgaacgtgatggagctgctccataaccgtctgaaccatgttgccatggacaccatcaaggagatggtagctagcaaggtggacatgggcattaaggtgaacacgcgtgatctgagcctttatgagtgtgttccatgtattgagtccaaaatgaagtggatgacctacagcaggaatcctcgacgtgcgaccaggccgctggagaaactgtcggctgacactgcacgatcaatgaagtgtccgcagacaagtctaccatgttcctgctggtcatggatgaattttcgaggtacaagtgggcgtacttgctcaagtccaaggcggacgcgagtgaccatctcaaacatctcatcctgaagctggagaagaagttctagccgctcagtgtgatgttgttccacgccgatggaggaggagagtttatcagcaatgactttactgcattttgcgctgaccaaggtgtggaactaaactacactcatgctgatagccctgaagagaacgggatcgtcgagaggaacaatggaattatcgtgtcgcgggtcaggtcgatgctggatgctactcgccttccgaactcgctgtggggtgaagcactcttgcatgctgttgatacgctcaacgtttgccctacgagtgcgctgcaaggccgcagcagccatgaggttttgtacggaagcctaccaagtctacgatcgctgccgacgtggggatgcctggcgcacgtacatatcaatgacttctcgcgtcagcgaaaagaaaagttggcgactcgtgctcggacgtgcatcttactggggtataccagtaccaagaagggctacaaattctggatgttgtgagtggagcggtagtcacagcgcgtggcgagaatgtccgcttccatgaggcgtttacgattgagtctgactatgtgggtcagttggtgctcaacacgttctttcacggggattttcagttgtcgagagatgttccagtggtgtgtatcaagtcaagcatggacacgtacgtcaaggacgatcgtgcctctcagattgagattgttgaggagcctactgctactgctactggaaatgctcctgctgcagagccggtaccagcgtccccggagtccaggtggcatcaaacggaaacggtcagatgaacaacaagaattacttcgtgcagcgtgtgatgacgaggactgggtgccgaccccgtcaacggctgctgagtgtggaccacgaccgccgttgccaaagcggcagcgaaagccgtcggttcgactacctgacgtggtgaatagtgtacatgtgcatgaagaagttgtggtgcctaccacgtacaagcaagcacgggcatcgcgccagtggaagaagtggagagaagctatgcttgaggaacttgcatcgctcaaggctcatggcacctggcggctggtgcgtcgccgcgagatgcgtggacgcaaagcaatcacttgtcgctgggtttatgcagtaaaacgagacgagtgtggccggatcaagcgctataaggcatgcctcgtgatccacggcttcaagcagctgactggcttgaagtacacggagacgtacgcgcctgtaattaggttcgcgacgatccgtgccgccatctactttgcacttcagcgtggctgggtcatcttgcaatgcgacgtgaagacggcctacctctatggccacctggacgaagtgatattcatggagcaacccgcaggtttccagtgcatatgtgtgtcgccccccacggagtttgtacggcttgcgtcaagcgcctaatgtatggaaccggacgctgcacaaagcgctggagcgtctcgggttctctaggcttgactctgactacggcctttacgcacgaaaagtgggagaaagtggtgaaatctgtatgctgttgacggtgtacgttgatgatgtcctactgcttgggccacctgatctgtgccgcagcgtcgtgagctgacagaattgggccccgtcaagtatctactcagtgtagagatcctaattgaccccctacgtaaggaagtagtgtactgccaacgccagcacgtcaaagacatcctgaagcgattcaacatggtgtcgtgcaacggctgcgcgacaccagaagcaacaacaccgcagcagttacgagctcctgttgataaatcatacctcccgtaccgtgatctagtgagagctctccagtacctggtttcggcgtcaaggccggacattgcccacgcggtgtggaacctggacaagtatctgagcaactacacttacgagcactacttcatggcgaagcgagtgctgcggtacttagccaacaccgtcgactacgggctagtcaacacaattggagccggatcaagggttactgtgacctgctttacggatgctgactacgcgaacgatgttgacgaccgcaagagtatcagcggatatgtgactatgctagatgacaacgtggtttcgtacgcgtctcgaaaacaagaaatcaatgcccaaagtactaccgaagcggagtacgtggcgatgaacgagggcacaaaggacttgctgtggatgttgggcctgtgcctggagttgaactgggaggttgaagggcctgtactctacggtgacaatcgaggcagcatttacctggctgctaagcccggaaagcactcaaagacgaagcatatcaagaacaagtatcacttggtgcggcaccttgtggaggcaaagcgccttacaacccagcatgttggtacgaatgacatgattgctgacgtgatgaccaaggcacttgggcgttccaagttcgagcactgccgagaactgctaaaagtgctttcaatcccagacagcaagagatcttcaacagaggaaagtggaggttaagtgggagccacagtgatgaggactgttcgccaaggcccgctgcctacgtctatcaagaaggacaacctgcctgggtatgcgctgccctactggacagaagcgtactgacaatagctggcagtactactgtgagtatgtgacgaccaaggttggtcatctaagctgatgaagcagccttggtcgagtggaagtgtgaagtatgtgtcgtgtaggaaaacacgagtttacgagtcctcgccctatcaaccgaagtctataggacgagccctaacaacaacacacgccgtctccgaagagtcggcgatagattgtcgggataataaaccggaagaccaggtccgatcccttatacgggctggaatgggtcccctgtgtgttgcgggtcaggtaggtttacccttcgttaaaatataagagaacccttagccacaagctacggctaggatgcaatgtgtaatacgtgctttcgcactaaacctctgtggtccctcagaaaggaagggtatcaggccaatcgaagcctcttacaggggcgccggggcgaagcctcggctagaagtcaaatacactggggggtccttgcctcacacccagtcaaacgtacaactgtacacagaggtctctaatacctcccgacactcggccacctactcactcttggccttaccaggatgaacactcggtcaatgcaccttatgctcaccggcagacataccccgtgcagccgagtgtatcagaccctacgctaagcttagcgacttaccgtagacggacttgacccttgtgtggcttgggggggaaattctgctctgtttaatgattagaggctgtcaggcctctcctatagctaatccgtaaggtctatacaaatatcaagtgtggaccgagctttcgagctgatctacaaccggacgaaacttcgtcctaaatccgaactcctactgggcataaagtgtacccactatgaaacttcggaggcctcggcaggcggtttattttgacccgccgagaccctcctgtcactccgtagtctctatcaatcttctgggcactaaagcgcggggaatgtgaccgaccaatccgagccctcggtcagccatcactcgcaagctcaaggcagttagacctcggccggaagtcagtcatttcccgatctcacatatgcatgctgactcgccagagtcgcggcccgaagcgcggctgcctgcacatcgtaggatagaacagagtagatctaagccaaccattctcactgtaatacacttgtggagggcactgccgtcgccgcacggcacttcgatccgtgccctcctgctcggcttctgcccagcaatctgcgccttacctgtatggttatagtaaatacacaagctcacactgccatggtgcgaccacatcaggggcgctgtgagcttgtgcgagggtaagcgcgaggacccccctttccaatcccaccgcggcctaaaaatccaagcccctcggaaaatttccgtcagtcagccggaagaggaggcgcagcaagagatccaaagtcagaggttcaagctgcgagaggcgctcaagctgctctcggtcgtgtccttggtggacaatgagacgtggaggaaactactggtgcagacaggtgtgctggctcgaggattcgccgtctcagaggagttcgacggatcccccacccgctttctactggagttaccctacgggagacgccgtcctacagacgacgatagcagcagactactcggtattgccgtgcacaactcgggtcccgagctcgcactcagtggcgacttggtgtttttctgcggggtcgagcaacatggccgacccagcaggggatacgaggcggcgttgaagaagatcgtcgaaatttggaggaggaaacgagagctaggagccgttccagatgaaattgaagttccgatcacaacccaagtgtgctcgacccatttggacagaccgggagggggcctggtcaagtacgcgcagaatgtgctgagggcgattcgccacctccgagaccagacgtggcctccgaggagaggcaggaccggcctccccagggtcacgtttgtgctggaatcacttcgagtggacctcggagcagtgctaattaagtcggacgtaacagcgttggtggaggctatcgctcatgacggtgtttactgctcgggactgagcttttggtccgaggttgatgacactttatatacccccgcaaaacgaggcccggcgcggaagacggtgggtaaattcgttacgagcttgttcagtggatccttgggagatgatggaagacgagtaatgactggcccacgcgctagtgcctcgacaactccccatccacgcagcctgggctcagtcaacatattatgcctcccgtttcgagcatggttattcgagcgtgcgtgctctggagcagttgtgaaccaaaccacgaaccacgtatcgctttcaagcaggagagaggacaacggggaagtcgccacgtggaggtggcggtggattcgctacggattcttttctaagcgagcacagcgcctgtcatgcctcaagacacttacacttcaagatgtggctcttactggacaagatgtggacgcgatgcgagaggttatggcgtcaaactatccggaagaagacctgctgggtttgccacacctgcagcaggcacggattagctattccatcaagccaaagacacgtattcgactacaacccatgagcacgagtgaaatcctcgagaaaaacgcggcctccacagttgccagagagattcgtggtgtcaagctcctggcggataaagctgagaatgggtgggtcgatgtgctggtacctgggtttgggaagtgccaaactcgccgatctaatctcgttcaagaggagaatctacctgatggatggcacacttgctaccggcatttcgacgctgatgcttgtgttcaagaccgatccgaatgacgacgttttgtgccgatttctggaaatgattggatcctcgctggcgtatttatccatccaagcgtcgaactttcgcacatccatgctggagagaattgctgccaactgcccgcagttgagagaaattgccatctcgacgcctgcttccaagattcgatttgaagttcgtggcagcagattacggaaccagataacgttgcacccacaggcgccagcctctttgggagacactagcgatctcgtcatgttattctgtgcgcctccgtcctcattagctagttcggtgaggcgtgtgcgcgttcatatcggaactgacggtaatggtaccggcgcactgtcattccaggagttttgtgtagcactgctacacatgcttgaacgaaaccgcacggtggagtaccttgatgtcgtggtgtcggacttcgagctcacccagtatcaagcagcattagcattgctgttcaagaagttccatcttcagaagctgccggttatccgagaagcgttgcctttgaaagcgacgctcggctttatcagcgtgatgacacctccaagccgccaagaccgaagtaccagcatatccaagcgtactcgggagctcgcgttgtttctacgagctggctaggcatacaaccgagttgatatttgcgtttgcagctacccccgcagtccgcaaagtgttttatcgacacaggggtttcccggagcccggaagtgaccatttcccgatataatcgctggcccgcgcctggggtcaaagctaaatggaaagaacacacacttttgacgttacagtaaatgccagattgcacgatttcgaggtagatgtacagttgtcatacgaaagtatgctattcgttggcatcacccgattaaaaaggtaccgtcggttcgatagctcgtcaggtgttgataggcctcgcaatccatacgaatcaaacctcagtggacagctctacggtataaaaaatactatgctaacgcgtgaacgtagcattctgccagggatagcgagccattgcccctgtccgacatttcgaatgcggaaacccgatgcggaaaagtaagctggtaccgacagtgtcgtgattgattcatttcaagatagctagatggatactttcagtatatctaggaccacagaaaaacagctctagacaaacggcagacgcccgacacaaaagaattccagcagcgatgtacaaccgaatcgacatgttaacagcgccaaggttgcggtgccgtcgttccgctacatttgcacaatctggctcaagacgcacaaactcacgaaaaccccgcttcaaaaaggagaaagcattatattttggttttgaattctaggcgaatgcgccaaggtacagctgatgaaccttaattaattggtgcaagacgccagagaggtaagaaggtaggtaggtaggtaggtaggtggctgcgcggtcggccaatttagcagtagtagagaccaccgaaaggcatgccgagaccgcagctgccgccgtagagacccgcgccgaacatgttccagtagcccatggggtaggcccagccagggacgccgccgcacatgaacccgaagcggtagggtccgtagccaccccagccaccccagttgccccagccgccgccgagaccccagccagcgccaagacccagaccccagccgccgtactgctccttcttgtcggcgtcaccatcgtgctttttgtcagcttccttggcggcgatcgcggcggcggcacccgcaggcgggtcgatcttctcactagtgcccatgagcgtgacaccatcgggcaactcggacgcttcaagcatctggagcgcttcggcggcggatttgacggccggcagattgccggcagcagcaggttgggcggcggcggcgacgacaccaacgacggcaagagcggcaacgaggaaggtgctgaacttcatggctgtgatgcggtgcggttcggcgctgaattcggagatcgggtggtactcgacttgctcaagtggaggcagatcgtgttgtgggtccgaagatgacggcgaaaaggcgggcgcagtgttggaacgaacgagtctgcttcgatcggggaggttcgtttggcaaagtcgccgaatttgcgggcgaattctcgcggcgatgaagtaagtggtagtgattgatgcgcttcttgtcggcgcgcctcaatcgctgccaaacggcgaatacagtagcgccaacggctccgaaatatggttcatacaaaagcacaattgtggcagtttattcggaaaaagtaaacctaaaaccgagtggacgtaggtactactgtagtagcatgctgctaggctagcacaagcacaacaggtgaacttaaatacatgtcttactgcccggcattttaacaaatgctgaacattggtgtggaaaaggaaactgataccgacagatttttgttggattagttggattagttggatatctggatggaacatttcaggatttctaggagtctagatactataccagacaccgaacagatacagaatccccagccaaacgaactacagccgatcgccgaagccacgctgccgataacattgcacaatctggctcaagacgcacaaactcacgaaaaccccgcttcaaaaaggagaaagcattatattttggttttgaattctaggcgaatgcgccaaggtacagctgatgaaccttaattaattggtgcaagacgccagagaggtaagaaggtaggtaggtaggtaggtaggtaggtaggtaggtggctgcgcggtcggccaatttagcagtagtagagaccgccgaaaggcatgccgagaccgcagctgccgccgtagagacccgcgccgaacatgttccagtagcccatggggtaggcccagccagggacgccgccgcacatgaacccgaagcggtagggtccgtagccaccccagccaccccagttgccccagccgccgccgagaccccagccagcgccaagacccagaccccagccgccgtactgctccttcttgtcggcgtcaccatcgtgcttgttgtcagcttccttggcggcgatcgcggcggcggcacccgcaggcgggtcgatcttctcactagtgcccatgagcgtgacaccatcgggcaactcggacgcttcaagcttctggagcgcttcggcggcggatttgatggccggcagattgccggcagcagcaggttgggcggcggcggcgacgacaccaacgacggcaagagcggcaacgaggaaggtgctgaacttcatggctgtgatgcggtgcggttcggcgctgaattcggagatcgggtggtactcgacttgctcaagtggaggcagatcgtgttgtgggtccgaagatgacggcgaaaaggcgggcgcagtgttggaacgaacgagtctgcttcgatcggggaggttcgtttggcaaagtcgccgaatttgcgggcgaattctcgcggcgatgaagtaagtggtagtgattgatgcgcttcttgtcggcgcgcctcaatcgctgccaaacggcaaatacagtagcgccaacggctccgaaatatggttcatacaaaagcacaattgtggcagtttattcggaaaagtaaacctaaaaccgagtggacgtaggtactactgtagtagcatgctgctaggctacaacaggtgaactttcataaatgccttgctgcccggcattttaacaaatgagactgcggcaaacacccagttactaatcaacctaagtacgaatcgcgaattaaccccttgaacgcgatttccagcgcgcccatttcactaaaccctagggcagttatcctgtataatggggaaggggtacaatagtgaacttagtatgattttatatcatgtatatggaaagtcgcacgaaagccctacacctaagatggtgaaaaatatttatcctgtatgagccatgataagagggcggtttagatacaggaaaagtgtctaacttgtatggtatagatcaaagacatgaccgccttttgacagaaaaatgcaactttgttataaaaaaagagcgcgtgtataccatacctcaactaagatataagctctgcaccttgtgtcttgcatctatcagccttcaatcgtcacgctgtcgtcgcttagactggtgggcatcgtcgccctcgctgttatctcctcttccccgcccctccgtatctctgctggcgccgactgtggtcctccacgcatgaaaccatcttctactgcgatgacgacaacataatatcattcacctgtgccgaagtgagggcttgtagcaggaaatagactcgctgttgccttggcacacaagtcaacgcaaaaaaactatggccttctttgagccgccccggccctcgctgcgctgtgatagaacgtcgtttcactgtccttccagaccctagttttcttccacacgaaggacactttggtcacacggtggcgtctccattccacttgtttgttctcgctctgctcagaacagtcactaccgattcggttatgatggtccaacaacactggtatgacgcttgctagtatacttcagatctatacatacgggataacgatgttgatagcttgtatcagacacgttaagataactttgcgaccaaaacaagattgagcgtgctacaaagcacactagctattcagcacatgacataggacgactgggaacaacaacgtttaaacatcatcatccttcatttatatggtttattattgacatatacgcgcaattaattgggcgataactttgaccgcaacattgcatgaagtgggactcgctgaatgacgtgccttgccctggtatgtagcttgctggaaacgttgctcgtagggagctggatgcgcggatagaccgaagggttgagaaagcccgcgtcaacccggcacgtggcccagcaccagtcgaagctctagcaactatagtcgaagcacgtatatacacgattagacacaagagtaatttgaatagcacacaatagccttgaggggcacctttatccacatcttcccgcactgttgtcgccgaacaaaagccagaagtcctttggcttacgtttcgcaggctgcggcagacagccttggcaccgagcgaagctctatcaactgcaatagcaacatttttttttgaaattagctaagtgagtggcgtagatagtagttatagcaatgaaccgcaccttttccttcgctatcagcatcctcagctaatcaaaccgcagcccggagagctggtgcgctgagaccagcttggcgctacggaagctgctgtgacgtcggtcgaagcactcgcggctgcattagtagcatgtacatacacgattagacacaaacataacgtgaagaatacaagatgtcattgctcaccgttttctgtcgatccgcggtttccggtactgttgtggcagcagcttcagtgcaacggagctgtcgaagattgttactactcttctgcatcatttacgcatgttagcaaaatgccagcagtattacaaacatcgcaatcacttacctagtcaagcgtgactagtcggaacatcggtccctcagctccgacgaagcagccggttccttcataccccctctgggtctttcgcggcgcacgtgagagtggagtcttgctcttagatttcccccattgctgggttagatcaatccagcgcgcagtaaatctggtcgttgttcttggtcggcaagttctggaatgagattgaacgagtggcgtcggtgattctaaatatcgtgtggtctacctcatgcactgtcttattttgagacactttagtggtacagtcaaacctgtttatatgaggccctgttggtgaccatctactacaatgactcatataaaatggactcagttaaaaaaatatgtggtgcacgtaaagaaatcgtgcatagttcgctgccgctttgccttcaccgtagtctctcgaaccaaagcggtcacggtctgtaaagctcttcgttctctgtcactctgctctccgcattgcagcagaaatgcagccagctccatgcagtgtctcagagcaatggcaggttgaactgcgggttcctgttcctcctcttcctcctgctcgtcctgcgaaactgcatcacttcctgccgcttcgtccactagcacatctggctcgtgcacaggaacgtctacgtccactgccagatactcactagcgctaacagcgccctcccacctcgatagcatcgccgttaactcctccatctcgttgctggatacctcctcaatgtaatccgtgtcagcacgggtccttcctagcatctttcctcccaaaatgcgagtcttgacccagcaatttgtaattgtcgttggcgtcacacccgcccaagcatcaatggacaattggacagcttccagtacgttgagcttgcgtgtaatgttagcttcaagtgcatccaaacaccaccgcccaaaatactttcgctaccgagccttgaacgacccgataatacctgaataaaaaaaacaccgtaatagagttggttcgtttaggctacaccacaatatagataaaatatttacctgcatccagcggctgtacggcggatgtcatgttaggagggaggaagtgaacagtcacatgagtcaggtttcgtagaagcttttggcatgaaacattgtcgactagaagtaggaccttgcgattggcggccgccattctcatgttgaagaggtgcagccattcgtcaaaaatgacggatgtcatccaggcgttcttggaggacttgtataatataggtttacctttaatcgccgctccctttttaaagcacctcgggttcttggccgtaccgatgactattgggtcgagcttgtcggagccagtcgcgttgcagcagaaggccaaagtcaaacgttgcttctcctttttcttgcccttgcgaatagtcgtagctagcgttcgattaggcgctaagcgatagaaaaacgccgtttcgtcgaagttgaacacattctcgggtgtaaactgcgccaccaactcttgtagctctagcctcgcatctcgcacttcatcagcttctacagcgccaccttcgccgtgtagcgtatgggagcggatcccattgcgcttcttaaagcttggaagccagccgttgctgagtcggagctgcgttgcatcgatgcctaagcgctccgccagctcatgcgccttcagcaggagcacgtcgtccgccatcgccgttttgcttcgttctgaaagaaaaattccctcagttcccgctcgaacggagggaatttcactcgccgccgcttggtcgcactcaggtcgacgtggctgaagtaggaagaaggcaggttgcgcagtcgcgcgagtgtggcacggctggcccgggccttgcaggttgcgtagatccactcggcgagcatggggttgttcatgccaggattctgcttgagctttaggtgcacttggagcttttgttctagcgtcagacaggtgcgaggagacatggcgagccaagaaggcttgcggtaggcgttgagtattgagcagtggtgctttgaagagtgtgtggccgtgagcagtgtgaatcaaataaacaggtgagacctaatttggtcccaaaaaatgtgactcatataccttgtatgcatataaacagagatcatacaaaaactaagtgaaatatttggtagcgacaaagcctgcatcaaataaacggcatggctcaaatagagaggatcatataaacaggtttgactgtatttttcagcactcgggggtgggggagtctatccggctccccgaaccctttttgacttaaaatttgtatgttcatacctaaaacaagataaaatccttatcgtgtctaatacaagataagcattttttgtaatcgtgtctaatacaggctctcgcgttcaaggggttaaccacataaatcgatatagctatgtcttgtgcttcttttaagctactaacggcttacaaatgttgagaactcaacaagtgacgccggtccgaaaaaatatttcctttttcggacccccaaaatccctgatattatttggggcgtgtgagctcaatttttcttcaattttggctttttgtacatttttggaatgcttgagttaatgataatcgagccgaaatattttaacttattctacgagtgattttcactttcaaaattgtgatgtccggttatgttcgaaaattgatagggcaacttaaaacgcgattatctcgataactctataaggtggataagtatcattgtgtcagccgccgtctcaaatgctgaacattgatgtagaccgacagtttcgtgggatttttgctggattagttggactggttacccgggcccagagccaagcccgttggtcccggggggagggtcgtagttcgtaagaaaggttaattgtggtgtattagttgcgtttaccgtagttgtggagtattgtgtgctagccacagtaagcgagtatacgcccaggagcctaagtaagaaaggttaaatgtacttttttcaaattctctctccccacaaagctacattaaaaacagtgaagacgtaagcatattctaaaaccctgttcgaatgaaatatgaccaaaggccctaattatcaagacgcgggattaaaaaaaaatgaccaccgcagcaagaagctcaacttgttgctaagcacaccagtgataaaaatgaaggacagaaatttaactcgaccagctgaagacatgtccccgaccggataaaccggaacttccggtttatctctctaaatgctacataacctccgaacagccccacgcagtacttgtccatctctcggttagctattggttcttgacgcgtagtctttacttaatgctgaatttatcggagtcactggccgcacacttgggattacaacatttgtttttctctcagtaagcttaccagctcgtgtcgaggcttggattcgacattacatcgagctgttcaacgcggattcaattgtctgttgcaatcgtagtcgagatgtacttgatgatcatcacaccaacaagcatgtggggcaatttgatttctttatttgccaaatgaaaaaaaatcacaagcgacttgggcgcgcctcacttgcggcgcacctgtcgcagtaataaatatcttctctgagcttacttgaacgctctagcatatatcgagattgtcttgcgttcttcgggttcggtcacaagatgcgcctgcacaggatccaggttcgcagcgagtagattatcttgcagtcggacgcctttacgcacctgcttgtagacccttccaatgagacttgtcctttgggtcgtccttgaaatcgtgatacagagtatcgacaacttcgctaatattgtcagagcttaatgcttgttaggtcaagaccgcggcaattgcagacgaacacattggtgctgcacgtagttgtggcccgattggccttttctagctgctgcctcctgttcagcaaattctaaaatggtattaagtgagccggccccgctcggatcgggaacatcatggtctatacctccatcttctggcctatacctttacctcacgggactcccctgagttatgtgtccaacactagttattccgcataccaatgcttagataaatcgaccctatacaacggtaagtcattcgaaagcatacgaacctcaagatattttatttcaatgcaaaacttaaaaaaaaaaattctggcgataccggtatctgacatcaaacaggtagtaacgacagttcttacgaactgcgaatatctggatggataatttcaggacttctaggcttctagctaccataccagacaccgaatacatacagaatccccagccaaacgaactgcaaccgatcgccgaagacgttggcgctactgtatttgccgtttggcagcgattgaggcgcgccgacaagaagcgcatcaatcactaccacttacttcatcgccgcgagaattcgcccgcaaattcggcgactttgccaaacgaacctccccgatcgaagcagactcgttcgttccaacactgcgcccgccttttcgccgtcatcttcggacccacaacacgatctgcctccacttgagcaagtcgagtaccacccgatctccgaattcagcgccgaaccgcaccgcatcacagccatgaagttcagcaccttcctcgttgccgctcttgccgtcgttggtgtcgtcgccgccgccgcccaacctgctgctgccggcaatctgccggccgtcaaatccgccgccgaagcgctccagatgcttgaagcgtccgagttgcccgatggtgtcacgctcatgggcactagtgagaagatcgacccgcctgcgggtgccgccgccgcgatcgccgccaaggaagctgacaacaagcacgatggtgacgccgacaagaaggagcagtacggcggctggggtctgggtcttggcgctggctggggtctcggcggcggctggggcaactggggtggctggggtggctacggaccctaccgcttcgggttcatgtgcggcggcgtccctggctgggcctaccccatgggctactggaacatgttcggcgcgggtctctacggcggcagctgcggtctcggcatgcctttcggcggtctctactactgctaaattggccgaccgcgcagccacctacctacctacctacctacctacctacctacctacctacctacctacctacctacctacctacctaccttcttacctctctggcgtcttgcaccaattaattaaggttcatcagctgtaccttggcgcattcgcctagaattcaaaaccaaaatataatgctttctcctttttgaagcggggttttcgtgagtttgtgcgtcttgagccagattgtgcaatgttatcggaagcgtggcttcggcgatcggctgtagttcgtttggctggggattctgtatctgttcggtgtctggtatagtatctagactcctagaaatcctgaaatgttccatccagatatccaactaatttaactaatccaacaaaaatctgtcggtatcagtttccttttccacaccaatgttcagcatttgttaaaatgccgggcagtaagacatgtatttaagttcacctgttgtgcttgtgctagcctagcagcatgctactacagtagtacctacgtccactcggttttaggtttactttttccgaataaactgccacaattgtgcttttgtatgaaccatatttcggagccgttggcgctactgtatttgccgtttggcagcgattgaggcgcgccgacaagaagcgcatcaatcactaccacttacttcatcgccgcgagaattcgcccgcaaattcggcgactttgccaaacgaacctccccgatcgaagcagactcgttcgttccaacactgcgcccgccttttcgccgtcatcttcggacccacaacacgatctgcctccacttgagcaagtcgagtaccacccgatctccgaattcagcgccgaaccgcaccgcatcacagccatgaagttcagcaccttcctcgttgccgctcttgccgtcgttggtgtcgtcgccgccgccgcccaacctgctgctgccggcaatctgccggccgtcaaatccgccgccgaagcgctccagatgcttgaagcgtccgagttgcccgatggtgtcacgctcatgggcactagtgagaagatcgacccgcctgcgggtgccgccgccgcgatcgccgccaaggaagctgacaacaagcacgatggtgacgccgacaagaaggagcagtacggcggctggggtctgggtcttggcgctggctggggtctcggcggcggctggggcaactggggtggctggggtggctacggaccctaccgcttcgggttcatgtgcggcggcgtccctggctgggcctaccccatgggctactggaacatgttcggcgcgggtctctacggcggcagctgcggtctcggcatgcctttcggcggtctctactactgctaaattggccgaccgcgcagccacctacctacctacctacctacctacctacctacctaccttcttacctctctggcgtcttgcaccaattaattaaggttcatcagctgtaccttggcgcattcgcctaaaattcaaaaccaaaatataatgctttctcctttttgaagcggggttttcgtgagtttgtgcgtcttgagccagattgtgcaatgttatcggaagcgtggcttcggcgatcggctgtagttcgtttggctggggattctgtatctgttcggtgtctggtatagtatctagactcctagaaatcctgaaatgttccatccagatatccaactaatctaactaatccaacaaaaatctgtcggtatcagtttccttttccacaccaatgttcagcatttgttaaaatgccgggcagtaagacatgtatttaagttcacctgttgtgcttgtgctagcctagcagcatgctactacagtagtacctacgtccactcggtttgaggtttactttttccgaataaactgccacaattgtgcttttgtatgaaccatatttcggagccgttggcgctactgtattcgccgtttggcagcgattgaggcgcgccgacaagaagcgcatcaatcactaccacttacttcatcgccgcgagaattcgcccgcaaattcggcgactttgccaaacgaacctccccgatcgaagcagactcgttcgttccaacactgcgcccgccttttcgccgtcatcttcggacccacaacacgatctgcctccacttgagcaagtcgagtaccacccgatctccgaattcagcgccgaaccgcaccgcatcacagccatgaagttcagcaccttcctcgttgccgctcttgccgtcgttggtgtcgtcgccgccgccgcccaacctgctgctgccggcaatctgccggccgtcaaatccgccgccgaagcgctccagatgcttgaagcgtccgagttgcccgatggtgtcacgctcatgggcactagtgagaagatcgacccgcctgcgggtgccgccgccgcgatcgccgccaaggaagctgacaaaaagcacgatggtgacgccgacaagaaggagcagtacggcggctggggtctgggtcttggcgctggctggggtctcggcggcggctggggcaactggggtggctggggtggctacggaccctaccgcttcgggttcatgtgcggcggcgtccctggctgggcctaccccatgggctactggaacatgttcggcgcgggtctctacggcggcagctgcggtctcggcatgcctttcggtggtctctactactgctaaattggccgaccgcgcagccacctacctacctacctacctaccttcttacctctctggcgtcttgcaccaattaattaaggttcatcagctgtaccttggcgcattcgcctagaattcaaaaccaaaatataatgctttctcctttttgaagcggggttttcgtgagtttgtgcgtcttgagccagattgtgcaaatgtagcggaacgacggcaccgcaaccttggcgctgttaacatgtcgattcggttgtacatcgctgctggaattcttttgtgtcgggcgtctgccgtttgtctagagctgtttttctgtggtcctagatatactgaaagtatccatctagctatcttgaaatgaatcaatcacgacactgtcggtaccagcttacttttccgcatcgggtttccgcattcgaaatgtcggacaggggcaatggctcgctatccctggcagaatgctacgttcacgcgttagcatagtattttttataccgtagagctgtccactgaggtttgattcgtatggattgcgaggcctatcaacacctgacgagctatcgaaccgacggtacctttttaatcgggtgatgccaacgaatagcatactttcgtatgacaactgtacatctacctcgaaatcgtgcaatctggcatttactgtaacgtcaaaagtgtgtgttctttccatttagctttgaccccaggcgcgggccagcgattatatcgggaaatggtcacttccgggctccgggaaacccctgtgtcgataaaacactttgcggactgcgggggtagctgcaaacgcaaatatcaactcggttgtatgcctagccagctcgtagaaacaacgcgagctcccgagtacgcttggatatgctggtacttcggtcttggcggcttggaggtgtcatcacgctgataaagccgagcgtcgctttcaaaggcaacgcttctcggataaccggcagcttctgaagatggaacttcttgaacagcaatgctaatgctgcttgatactgggtgagctcgaagtccgacaccacgacatcaaggtactccaccgtgcggtttcgttcaagcatgtgtagcagtgctacacaaaactcctggaatgacagtgcgccggtaccattaccgtcagttccgatatgaacgcgcacacgcctcaccgaactagctaatgaggacggaggcgcacagaataacatgacgagatcgctagtgtctcccaaagaggctggcgcctgtgggtgcaacgttatctggttccgtaatctgctgccacgaacttcaaatcgaatcttggaagcaggcgtcgagatggcaatttctctcaactgcgggcagttggcagcaattctctccagcatggatgtgcgaaagttcgacgcttggatggataaatacgccagcgaggatccaatcatttccagaaatcggcacaaaacgtcgtcattcggatcggtcttgaacacaagcatcagcgtcgaaatgccggtagcaagtgtgccatccatcaggtagattctcctcttgaacgagattagatcggcgagtttggcacttcccaaacccaggtaccagcacatcgacccacccattctcagctttatccgccaggagcttgacaccacgaatctctctggcaactgtggaggccgcgtttttctcgaggatttcactcgtgctcatgggttgtagtcgaatacgtgtctttggcttgatggaatagctaatccgtgcctgctgcaggtgtggcaaacccagcaggtcttcttccggatagtttgacgccataacctctcgcatcgcgtccacatcttgtccagtaagagccacatcttgaagtgtaagtgtcttgaggcatgacaggcgctgtgctcgcttagaaaagaatccgtagcgaatccaccgccacctccacgtggcgacttccccgttgtcctctctcctgcttgaaagcgatacgtggttcgtggtttggttcacaactgctccagagcacgcacgctcgaataaccatgctcgaaacgggaggcataatatgttgactgagcccaggctgcgtggatggggagttgtcgaggcactagcgcgtgggccagtcattactcgtcttccatcatctcccaaggatccactgaacaagctcgtaacgaatttacccaccgtcttccgcgccgggcctcgttttgcgggggtatataaagtgtcatcaacctcggaccaaaagctcagtcccgagcagtaaacaccgtcatgagcgatagcctccaccaacgctgttacgtccgacttaattagcactgctccgaggtccactcgaagtgattccagcacaaacgtgaccctggggaggccggtcctgcctctcctcggaggccacgtctggtctcggaggtggcgaatcgccctcagcacattctgcgcgtacttgaccaggccccctcccggtctgtccaaatgggtcgagcacacttgggttgtgatcggaacttcaatttcatctggaacggctcctagctctcgtttcctcctccaaatttcgacgatcttcttcaacgccgcctcgtatcccctgctgggtcggccatgttgctcgaccccgcagaaaaacaccaagtcgccactgagtgcgagctcgggacccgagttgtgcacggcaataccgagtagtctgctgctatcgtcgtctgtaggacggcgtctcccgtagggtaactccagtagaaagcgggtgggggatccgtcgaactcctctgagacggcgaatcctcgagccagcacacctgtctgcaccagtagtttcctccacgtctcattgtccaccaaggacacgaccgagagcagcttgagcgcctctcgcagcttgaacctctgactttggatctcttgctgcgcctcctcttccggctgactgacggaaattttccgaggggcttggatttttaggccgcggtgggattggaaaggggggtcctcgcgcttaccctcgcacaagctcacagcgcccctgatgtggtcgcaccatggcagtgtgagcttgtgtatttactataaccatacaggtaaggcgcagattgctgggcagaagccgagcaggagggcacggatcgaagtgccgtgcggcgacggcagtgccctccacaagtgtattacagtgagaatggttggcttagatctactctgttctatcctacgatgtgcaggcagccgcgcttcgggccgcgactctggcgagtcagcatgcatatgtgagatcgggaaatgactgacttccggccgaggtctaactgccttgagcttgcgagtgatggctgaccgagggctcggattggtcggtcacattccccgcgctttagtgcccagaagattgatagagactacggagtgacaggagggtctcggcgggtcaaaataaaccgcctgccgaggcctccgaagtttcatagtgggtacactttatgcccagtaggagttcggatttaggacgaagtttcgtccggttgtagatcagctcgaaagctcggtccacacttgatatttgtatagaccttacggattagctataggagaggcctgacagcctctaatcattaaacagagcagaatttcccccccaagccacacaagggtcaagtccgtctacggtaagtcgctaagcttagcgtagggtctgatacactcggctgcacggggtatgtctgccggtgagcataaggtgcattgaccgagtgttcatcctggtaaggccaagagtgagtaggtggccgagtgtcgggaggtattagagacctctgtgtacagttgtacgtttgactgggtgtgaggcaaggaccccccagtgtatttgacttctagccgaggcttcgccccggcgcccctgtaagaggcttcgattggcctgatacccttcctttctgagggaccacagaggtttagtgcgaaagcacgtattacacattgcatcctagccgtagcttgtggctaagggttctcttatattttaacgaagggtaaacctacctgacccgcaacacacaggggacccattccagcccgtataagggatcggacctggtcttccggtttattatcccgacaatctatcgccgactcttcggagacggcgtgtgttgttgttagggctcgtcctatagacttcggttgatagggcgaggactcgtaaactcgtgttttcctacacgacacatacttcacacttccactcgaccaaggctgcttcatcagcttagatgaccaaccttggtcgtcacatactcacagtagtactgccagctattgtcagtacgcttctgtccagtagggcagcgcatacccaggcaggttgtccttcttgatagacgtaggcagcgggccttggcgaacagtcctcatcactgtggctcccacttaacctccactttcctctgttgaagatctcttgctgtctgggattgaaagcacttttagcagttctcggcagtgctcgaacttggaacgcccaagtgccttggtcatcacgtcagcaatcatgtcattcgtaccaacatgctgggttgtaaggcgctttgcctccacaaggtgccgcaccaagtgatacttgttcttgatatgcttcgtctttgagtgctttccgggcttagcagccaggtaaatgctgcctcgattgtcaccgtagagtacaggcccttcaacctcccagttcaactccaggcacaggcccaacatccacagcaagtcctttgtgccctcgttcatcgccacgtactccgcttcggtagtactttgggcattgatttcttgttttcgagacgcgtacgaaaccacgttgtcatctagcatagtcacatatccgctgatactcttgcggtcgtcaacatcgttcgcgtagtcagcatccgtaaagcaggtcacagtaacccttgatccggctccaattgtgttgactagcccgtagtcgacggtgttggctaagtaccgcagcactcgcttcgccatgaagtagtgctcgtaagtgtagttgctcagatacttgtccaggttccacaccgcgtgggcaatgtccggccttgacgccgaaaccaggtactggagagctctcactagatcacggtacgggaggtatgatttatcaacaggagctcgtaactgctgcggtgttgttgcttctggtgtcgcgcagccgttgcacgacaccatgttgaatcgcttcaggatgtctttgacgtgctggcgttggcagtacactacttccttacgtagggggtcaattaggatctctacactgagtagatacttgacggggcccaattctgtcagctcacgacgctgcggcacagatcaggtggcccaagcagtaggacatcatcaacgtacaccgtcaacagcatacagatttcaccactttctcccacttttcgtgcgtaaaggccgtagtcagagtcaagcctagagaacccgagacgctccagcgctttgtgcagcgtccggttccatacattaggcgcttgacgcaagccgtacaaactccgtggggggcgacacacatatgcactggaaacctgcgggttgctccatgaatatcacttcgtccaggtggccatagaggtaggccgtcttcacgtcgcattgcaagatgacccagccacgctgaagtgcaaagtagatggcggcacggatcgtcgcgaacctaattacaggcgcgtacgtctccgtgtacttcaagccagtcagctgcttgaagccgtggatcacgaggcatgccttatagcgcttgatccggccacactcgtctcgttttactgcataaacccagcgacaagtgattgctttgcgtccacgcatctcgcggcgacgcaccagccgccaggtgccatgagccttgagcgatgcaagttcctcaagcatagcttctctccacttcttccactggcgcgatgcccgtgcttgcttgtacgtggtaggcaccacaacttcttcatgcacatgtacactattcaccacgtcaggtagtcgaaccgacggctttcgctgccgctttggcaacggcggtcgtggtccacactcagcagccgttgacggggtcggcacccagtcctcgtcatcacacgctgcacgaagtaattcttgttgttcatctgaccgtttccgtttgatgccacctggactccggggacgctggtaccggctctgcagcaggagcatttccagtagcagtagcagtaggctcctcaacaatctcaatctgagaggcacgatcgtccttgacgtacgtgtccatgcttgacttgatacacaccactggaacatctctcgacaactgaaaatccccgtgaaagaacgtgttgagcaccaactgacccacatagtcagactcaatcgtaaacgcctcatggaagcggacattctcgccacgcgctgtgactaccgctccactcacaacatccagaatttgtagcccttcttggtactggtataccccagtaagatgcacgtccgagcacgagtcgccaacttttcttttcgctgacgcgagaagtcattgatatgtacgtgcgccaggcatccccacgtcggcagcgatcgtagacttggtaggcttccgtacaaaacctcatggctgctgcggccttgcagcgcactcgtagggcaaacgttgagcgtatcaacagcatgcaagagtgcttcaccccacagcgagttcggaaggcgagtagcatccagcatcgacctgacccgcgacacgataattccattgttcctctcgacgatcccgttctcttcagggctatcagcatgagtgtagtttagttccacaccttggtcagcgcaaaatgcagtaaagtcattgctgataaactctcctcctccatcggcgtggaacaacatcacactgagcggctagaacttcttctccagcttcaggatgagatgtttgagatggtcactcgcgtccgccttggacttgagcaagtacgcccacttgtacctcgaaaattcatccatgaccagcaggaacatggtagacttgtctgcggacacttcattgatcgtgcagtgtcagccgacagtttctccagcggcctggtcgcacgtcgaggattcctgctgtaggtcatccacttcattttggactcaatacatggaacacactcataaaggctcagatcacgcgtgttcaccttaatgcccatgtccaccttgctagctaccatctccttgatggtgtccatggcaacatggttcagacggttatggagcagctccatcacgttcgagtcagtgctctgcttttgtgcgctcagtacgagcttgttgcggcgctccacgcgcatgcgatacaacccgtcccgcatcacaaacttcagctgcattgtcggcttcaccagccacgtcaccagctcatcagccgacacagtcagcttgttgccacactcgaactgcatgtaggtctgcgagattaggttgaccttggtgctcggcgagtagcgcacattctcgagcaagcgggtttcagtcttacccgagtgctcgttcacaactggcatgatcacagcatcttcaatctcaacacggtcaaaaccaccagtggcgccttccaacagctccgcctgcttcaggttcttgacgttgttaagtagcgccaggtcgccagtgacattgacctgagcccccgagtccaaaatccactcaatttcatttgcaggcaccgcgtcgtaccgtccacttctcactaccaacacacgccgtatgggaagcagaccagtagctacatgcaaactttcgtcatcatcatctggcggggacgtcggagaatattcaacagacttctcttcacgctgtgtgtcacgagcccggacaaggcgctcctcaaagtcgcggccgacatgcgctgtcagctcatggcgggtgtagatctttgagtagctattcacatcagctcgctggtgttcaacactcagggtcacggggtgggtctccacaaaatccacacgggggcggtcctgctgccgatcgcgctgtgcatccgcagggcagtcatcattctgctcctcttcgattcggcgcagtacnnnnnnnnnnnnnnnnnnnnnnnnnnnnnnnnnnnnnnnnnnnnnnnnnnnnnnnnnnnnnnnnnnnnnnnnnnnnnnnnnnnnnnnnnnnnnnnnnnnnttcagcgccgaaccgcaccgcatcacagccatgaagttcagcaccttcctcgttgccgctcttgccgtcgttggtgtcgtcgccgccgccgcccaacctgctgctgccggcaatctgccggccgtcaaatccgccgccgaagcgctccagatgcttgaagcgtccgagttgcccgatggtgtcacgctcatgggcactagtgagaagatcgacccgcctgcgggtgccgccgccgcgatcgccgccaaggaagctgacaacaagcacgatggtgacgccgacaagaaggagcagtacggcggctggggtctgggtcttggcgctggctggggtctcggcggcggctggggcaactggggtggctggggtggctacggaccctaccgcttcgggttcatgtgcggcggcgtccctggctgggcctaccccatgggctactggaacatgttcggcgcgggtctctacggcggcagctgcggtctcggcatgcctttcggcggtctctactactgctaaattggccgaccgcgcagccacctacccacctacctacctacctacctacctacctacctacctacctacctacctacctacctacctaccttcttacctctctggcgtcttgcaccaattaattaaggttcatcagctgtaccttggcgcattcgcctagaattcaaaaccaaaatataatgctttctcctttttgaagcggggttttcgtgagtttgtgcgtcttgagccagattgtgcaatgttatcggaagcgtggcttcggcgatcggctgtagttcgtttggctggggattctgtatctgttcggtgtctggtatagtatctagactcctagaaatcctgaaatgttccatccagatatccaactaatctaactaatccaacaaaaatctgtcggtatcagtttccttttccacaccaatgttcagcatttgttaaaatgccgggcagtaagacatgtatttaagttcacctgttgtgcttgtgctagcctagcagcatgctactacagtagtacctacgtccactcggtttgaggtttactttttccgaataaactgccacaattgtgcttttgtatgaaccatatttcggagccgttggcgctactgtattcgccgtttggcagcgattgaggcgcgccgacaagaagcgcatcaatcactaccacttacttcatcgccgcgagaattcgcccgcaaattcggcgactttgccaaacgaacctccccgatcgaagcagactcgttcgttccaacactgcgcccgccttttcgccgtcatcttcggacccacaacacgatctgcctccacttgagcaagtcgagtaccacccgatctccgaattcagcgccgaaccgcaccgcatcacagccatgaagttcagcaccttcctcgttgccgctcttgccgtcgttggtgtcgtcgccgccgccgcccaacctgctgctgccggcaatctgccggccgtcaaatccgccgccgaagcgctccagatgcttgaagcgtccgagttgcccgatggtgtcacgctcatgggcactagtgagaagatcgacccgcctgcgggtgccgccgccgcgatcgccgccaaggaagctgacaacaagcacgatggtgacgccgacaagaaggagcagtacggcggctggggtctgggtcttggcgctggctggggtctcggcggcggctggggcaactggggtggctggggtggctacggaccctaccgcttcgggttcatgtgcggcggcgtccctggctgggcctaccccatgggctactggaacatgttcggcgcgggtctctacggcggcagctgcggtctcggcatgcctttcggcggtctctactactgctaaattggccgaccgcgcagccacctacctacctacctacctacctacctacctacctacctacctacctacctacctacctacctacctacctaccttcttacctctctggcgtcttgcaccaattaattaaggttcatcagctgtaccttggcgcattcgcctaaaattcaaaaccaaaatataatgctttctcctttttgaagcggggttttcgtgagtttgtgcgtcttgagccagattgtgcaatgttatcggaagcgtggcttcggcgatcggctgtagttcgtttggctggggattctgtatctgttcggtgtctggtatagtatctagactcctagaaatcctgaaatgttccatccagatatccaactaatttaactaatccaacaaaaatctgtcggtatcagtttccttttccacaccaatgttcagcatttgttaaaatgccgggcagtaagacatgtatttaagttcacctgttgtgcttgtgctagcctagcagcatgctactacagtagtacctacgtccactcggttttaggtttactttttccgaataaactgccacaattgtgcttttgtatgaaccatatttcggagccgttggcgctactgtattcgccgtttggcagcgattgaggcgcgccgacaagaagcgcatcaatcactaccacttacttcatcgccgcgagaattcgcccgcaaattcggcgactttgccaaacgaacctccccgatcgaagcagactcgttcgttccaacactgcgcccgccttttcgccgtcatcttcggacccacaacacgatctgcctccacttgagcaagtcgagtaccacccgatctccgaattcagcgccgaaccgcaccgcatcacagccatgaagttcagcaccttcctcgttgccgctcttgccgtcgttggtgtcgtcgccgccgccgcccaacctgctgctgccggcaatctgccggccgtcaaatccgccgccgaagcgctccagaagcttgaagcgtccgagttgcccgatggtgtcacgctcacgggcactagtgagaagatcgacccgcctgcgggtgccgccgccgcgatcgccgccaaggaagctgacaacaagcacgatggtgacgccgacaagaaggagcagtacggcggctggggtctgggtcttggcgctggctggggtctcggcggcggctggggcaactggggtggctggggtggctacggaccctaccgcttcgggttcatgtgcggcggcgtccctggctgggcctaccccatgggctactggaacatgttcggcgcgggtctctacggcggcagctgcggtctcggcatgcctttcggcggtctctactactgctaaattggccgaccgcgcagccacctacctacctacctacctacctacctacctacctacctacctacctacctacctacctacctacctacctacctacctacctacctacctacctacctacctacctacctacctacctacctacctacctacctacctacctacctacctacctacctacctacctacctacctacctacctacctacctacctacctacctacctacctacctacctacctaccttcttacctctctggcgtcttgcaccaattaattaaggttcatcagctgtaccttggcgcattcgcctagaattcaaaaccaaaatataatgctttctcctttttgaagcggggttttcgtgagtttgtgcgtcttgagccagattgtgcaatgttatcggaagcgtggcttcggcgatcggctgtagttcgtttggctggggattctgtatctgttcggtgtctggtatagtatctagactcctagaaatcctgaaatgttccatccagatatccaactaatctaactaatccaacaaaaatctgtcggtatcagtttccttttccacaccaatgttcagcatttgttaaaatgccgggcagtaagacatgtatttaagttcacctgttgtgcttgtgctagcctagcagcatgctactacagtagtacctacgtccactcggtttgaggtttactttttccgaataaactgccacaattgtgcttttgtatgaaccatatttcggagccgttggcgctactgtattcgccgtttggcagcgattgaggcgcgccgacaagaagcgcatcaatcactaccacttacttcatcgccgcgagaattcgcccgcaaattcggcgactttgccaaacgaacctccccgatcgaagcagactcgttcgttccaacactgcgcccgccttttcgccgtcatcttcggacccacaacacgatctgcctccacttgagcaagtcgagtaccacccgatctccgaattcagcgccgaaccgcaccgcatcacagccatgaagttcagcaccttcctcgttgccgctcttgccgtcgttggtgtcgtcgccgccgccgcccaacctgctgctgccggcaatctgccggccgtcaaatccgccgccgaagcgctccagaagcttgaagcgtccgagttgcccgatggtgtcacgctcatgggcactagtgagaagatcgacccgcctgcgggtgccgccgccgcgatcgccgccaaggaagctgacaacaagcacgatggtgacgccgacaagaaggagcagtacggcggctggggtctgggtcttggcgctggctggggtctcggcggcggctggggcaactggggtggctggggtggctacggaccctaccgcttcgggttcatgtgcggcggcgtccctggctgggcctaccccatgggctactggaacatgttcggcgcgggtctctacggcggcagctgcggtctcggcatgcctttcggcggtctctactactgctaaattggccgaccgcgcagccacctacccacctacctacctacctacctacctacctacctacctacctacctacctacctacctacctaccttcttacctctctggcgtcttgcaccaattaattaaggttcatcagctgtaccttggcgcattcgcctagaattcaaaaccaaaatataatgctttctcctttttgaagcggggttttcgtgagtttgtgcgtcttgagccagattgtgcaatgttatcggaagcgtggcttcggcgatcggctgtagttcgtttggctggggattctgtatctgttcggtgtctggtatagtatctagactcctagaaatcctgaaatgttccatccagatatccaactaatttaactaatccaacaaaaatctgtcggtatcagtttccttttccacaccaatgttcagcatttgttaaaatgccgggcagtaagacatgtatttaagttcacctgttgtgcttgtgctagcctagcagcatgctactacagtagtacctacgtccactcggtttgaggtttactttttccgaataaactgccacaattgtgcttttgtatgaaccatatttcggagccgttggcgctactgtatttgccgtttggcagcgattgaggcgcgccgacaagaagcgcatcaatcactaccacttacttcatcgccgcgagaattcgcccgcaaattcggcgactttgccaaacgaacctccccgatcgaagcagactcgttcgttccaacactgcgcccgccttttcgccgtcatcttcggacccacaacacgatctgcctccacttgagcaagtcgagtaccacccgatctccgaattcagcgccgaaccgcaccgcatcacagccatgaagttcagcaccttcctcgttgccgctcttgccgtcgttggtgtcgtcgccgccgccgcccaacctgctgctgccggcaatctgccggccgtcaaatccgccgccgaagcgctccagaagcttgaagcgtccgagttgcccgatggtgtcacgctcatgggcactagtgagaagatcgacccgcctgcgggtgccgccgccgcgatcgccgccaaggaagctgacaacaagcacgatggtgacgccgacaagaaggagcagtacggcggctggggtctgggtcttggcgctggctggggtctcggcggcggctggggcaactggggtggctggggtggctacggaccctaccgcttcgggttcatgtgcggcggcgtccctggctgggcctaccccatgggctactggaacatgttcggcgcgggtctctacggcggcagctgcggtctcggcatgccattcggcggtctctactactgctaaattggccgaccgcgcagccacctacctacctacctacctacctacctaccttcttacctctctggcgtcttgcaccaattaattaaggttcatcagctgtaccttggcgcattcgcctagaattcaaaaccaaaatataatgctttctcctttttgaagcggggttttcgtgagtttgtgcgtcttgagccagattgtgcaatgttatcggaagcgtggcttcggcgatcggctgtagttcgtttggctggggattctgtatctgttcggtgtctggtatagtatctagactcctagaaatcctgaaatgttccatccagatatccaactaatccaactaatccaacaaaaatctgtcggtatcagtttccttttccacaccaatgttcagcatttgttaaaatgccgggcagtaagacatgtatttaagttcacctgttgtgcttgtgctagcctagcagcatgctactacagtagtacctacgtccactcggtttgaggtttactttttccgaataaactgccacaattgtgcttttgtatgaaccatatttcggagccgttggcgctactgtatttgccgtttggcagcgattgaggcgcgccgacaagaagcgcatcaatcactaccacttacttcatcgccgcgagaattcgcccgcaaattcggcgactttgccaaacgaacctccccgatcgaagcagactcgttcgttccaacactgcgcccgccttttcgccgtcatcttcggacccacaacacgatctgcctccacttgagcaagtcgagtaccacccgatctccgaattcagcgccgaaccgcaccgcatcacagccatgaagttcagcaccttcctcgttgccgctcttgccgtcgttggtgtcgtcgccgccgccgcccaacctgctgctgccggcaatctgccggccgtcaaatccgccgccgaagcgctccagaagcttgaagcgtccgagttgcccgatggtgtcacgctcatgggcactagtgagaagatcgacccgcctgcgggtgccgccgccgcgatcgccgccaaggaagctgacaacaagcacgatggtgacgccgacaagaaggagcagtacggcggctggggtctgggtcttggcgctggctggggtctcggcggcggctggggcaactggggtggctggggtggctacggaccctaccgcttcgggttcatgtgcggcggcgtccctggctgggcctaccccatgggctactggaacatgttcggcgcgggtctctacggcggcagctgcggtctcggcatgccattcggcggtctctactactgctaaattggccgaccgcgcagccacctacctacctacctacctacctacctacctacctacctacctacctacctacctacctaccttcttacctctctggcgtcttgcaccaattaattaaggttcatcagctgtaccttggcgcattcgcctagaattcaaaaccaaaatataatgctttctcctttttgaagcggggttttcgtgagtttgtgcgtcttgagccagattgtgcaatgttatcggcagcgtggcttcggcgatcggctgtagttcgtttggctggggattctgtatctgttcggtgtctggtatagtatctagactcctagaaatcctgaaatgttccatccagatatccaactaatccaactaatccaacaaaaatctgtcagtatcagtttccttttccacaccaatgttcagcatttgttaaaatgccgggcagtaagacatgtatttaagttcacctgttgtgcttgtgctagcctagcagcatgctactacagtagtacctacgtccactcggttttaggtttactttttccgaataaactgccacaattgtgcttttgtatgaaccatatttcggagccgttggcgctactgtattcgccgtttggcagcgattgaggcgcgccgacaagaagcgcatcaatcactaccacttacttcatcgccgcgagaattcgcccgcaaattcggcgactttgccaaacgaaactccccgatcgaagcagactcgttcgttccaacactgcgcccgccttttcgccgtcatcttcggacccacaacacgatctgcctccacttgagcaagtcgagtaccacccgatctccgaattcagcgccgaaccgcaccgcatcacagccatgaagttcagcaccttcctcgttgccgctcttgccgtcgttggtgtcgtcgccgccgccgcccaacctgctgctgccggcaatctgccggccgtcaaatccgccgccgaagcgctccagaagcttgaagcgtccgagttgcccgatggtgtcacgctcacgggcaccagtgagaagatcgacccgcctgcgggtgccgccgccgcgatcgccgccaaggaagctgacaacaagcacgatggtgacgccgacaagaaggagcagtacggcggctggggtctgggtcttggcgctggctggggtctcggcggcggctggggcaactggggtggctggggtggctacggaccctaccgcttcgggttcatgtgcggcggcgtccctggctgggcctaccccatgggctactggaacatgttcggcgcgggtctctacggcggcagctgcggtctcggcatgcctttcggcggtctctactactgctaaattggccgaccgcgcagccacctacctacctacctacctacctacctacctaccttcttacctctctggcgtcttgcaccaattaattaaggttcatcagctgtaccttggcgcattcgcctagaattcaaaaccaaaatataatgctttctcctttttgaagcggggttttcgtgagtttgtgcgtcttgagccagattgtgcaatgttatcggcagcgtggcttcggcgatcggctgtagttcgtttggctggggattctgtatctgttcggtgtctggtatagtatctagactcctagaaatcctgaaatgttccatccagatatccaactaatccaactaatccaacaaaaatctgtcagtatcagtttccttttccacaccaatgttcagcatttgttaaaatgccgggcagtaagacatgtatttaagttcacctgttgtgcttgtgctagcctagcagcatgctactacagtagtacctacgtccactcggttttaggtttactttttccgaataaactgccacaattgtgcttttgtatgaaccatatttcggagccgttggcgctactgtattcgccgtttggcagcgattgaggcgcgccgacaagaagcgcatcaatcactaccacttacttcatcgccgcgagaattcacccgcaaattcggcgactttgccaaacgaacctccccgatcgaagcagactcgttcgttccaacactgcgcccgccttttcgccgtcatcttcggacccacaacacgatctgcctccacttgagcaagtcgagtaccacccgatctccgaattcagcgccgaaccgcaccgcatcacagccatgaagttcagcaccttcctcgttgccgctcttgccgtcgttggtgtcgtcgccgccgccgcccaacctgctgctgccggcaatctgccggccgtcaaatccgccgccgaagcgctccagaagcttgaagcgtccgagttgcccgatggtgtcacgctcatgggcaccagtgagaagatcgacccgcctgcgggtgccgccgccgcgatcgccgccaaggaagctgacaacaagcacgatggtgacgccgacaagaaggagcagtacggcggctggggtctgggtcttggcgctggctggggtctcggcggcggctggggcaactggggtggctggggtggctacggaccctaccgcttcgggttcatgtgcggcggcgtccctggctgggcctaccccatgggctactggaacatgttcggcgcgggtctctacggcggcagctgcggtctcggcatgcctttcggcggtctctactactgctaaattggccgaccgcgcagctacctacctacctacctaccttcttacctctctggcgtcttgcaccaattaattaaggttcatcagctgtaccttggcgcattttttcgtgagtttgtgcgtcttgagccagattgtgcaatgttatcggaagcgtggcttcggcgatcggctgtagttcgtttggctggggattctgtatctgttcggtgtctggtatagtatctagactcctagaaatcctgaaatgttccatccagatatccaactaatccaactaatccaacaaaaatctgtcggtatcagtttccttttccacaccaatgttcagcatttgttaaaatgccgggaagtaagacatgtatttaagttcacctgttgtgcttgtgctagcctagcagcatgctactacagtagtacctacgtccactcggtttgaggtttactttttccgaataaactgccacaattgtgcttttgtatgaaccatatttcggagccgttggcgctactgtatttgccgtttggcagcgattgaggcgcgccgacaagaagcgcatcaatcactaccacttacttcatcgccgcgagaattcgcccgcaaattcggcgactttgccaaacgaacctccccgatcgaagcagactcgttcgttccaacactgcgcccgccttttcgccgtcatcttcggacccacaacacgatctgcctccacttgagcaagtcgagtaccacccgatctccgaattcagcgccgaaccgcaccgcatcacagccatgaagttcagcaccttcctcgttgccgctcttgccgtcgttggtgtcgtcgccgccgccgcccaacctgctgctgccggcaatctgccggccgtcaaatccgccgccgaagcgctccagaagcttgaagcgtccgagttgcccgatggtgtcacgctcatgggcaccagtgagaagatcgacccgcctgcgggtgccgccgccgcgatcgccgccaaggaagctgacaacaagcacgatggtgacgccgacaagaaggagcagtacggcggctggggtctgggtcttggcgctggctggggtctcggcggcggctggggcaactggggtggctggggtggctacggaccctaccgcttcgggttcatgtgcggcggcgtccctggctgggcctaccccatgggctactggaacatgttcggcgcgggtctctacggcggcagctgcggtctcggcatgccattcggcggtctctactactgctaaattggccgaccgcgcagccacctacctacctacctacctacctacctacctaccttcttacctctctggcgtcttgcaccaattaattaaggttcatcagctgtaccttggcgcattcgcctagaattcaaaaccaaaatataatgctttctcctttttgaagcggggttttcgtgagtttgtgcgtcttgagccagattgtgcaatgttatcggaagcgtggcttcggcgatcggctgtagttcgtttggctggggattctgtatctgttcggtgtctggtatagtatctagactcctagaaatcctgaaatgttccatccagatatccaactaatctaactaatccaacaaaaatctgtcggtatcagtttccttttccacaccaatgttcagcatttgttaaaatgccgggcagtaagacatgtatttaagttcacctgttgtgcttgtgctagcctagcagcatgctactacagtagtacctacgtccannnnnnnnnnnnnnnnnnnnnnnnnnnnnnnnnnnnnnnnnnnnnnnnnnnnnnnnnnnnnnnnnnnnnnnnnnnnnnnnnnnnnnnnnnnnnnnnnnnnnnnnnnnnnnnnnnnnnnnnnnnnnnnnnnnnnnnnnnnnnnnnnnnnnnnnnnnnnnnnnnnnnnnnnnnnnnnnnnnnnnnnnnnnnnnnnnnnnnnnnnnnnnnnnnnnnnnnnnnnnnnnnnnnnnnnnnnnnnnnnnnnnnnnnnnnnnnnnnnnnnnnnnnnnnnnnnnnnnnnnnnnnnnnnnnnnnnnnnnnnnnnnnnnnnnnnnnnnnnnnnnnnnnnnnnnnnnnnnnnnnnnnnnnnnnnnnnnnnnnnnnnnnnnnnnnnnnnnnnnnnnnnnnnnnnnnnnnnnnnnnnnnnnnnnnnnnnnnnnnnnnnnnnnnnnnnnnnnnnnnnnnnnnnnnnnnnnnnnnnnnnnnnnnnnnnnnnnnnnnnnnnnnnnnnnnnnnnnnnnnnnnnnnnnnnnnnnnnnnnnnnnnnnnnnnnnnnnnnnnnnnnnnnnnnnnnnnnnnnnnnnnnnnnnnnnnnnnnnnnnnnnnnnnnnnnnnnnnnnnnnnnnnnnnnnnnnnnnnnnnnnnnnnnnnnnnnnnnnnnnnnnnnnnnnnnnnnnnnnnnnnnnnnnnnnnnnnnnnnnnnnnnnnnnnnnnnnnnnnnnnnnnnnnnnnnnnnnnnnnnnnnnnnnnnnnnnnnnnnnnnnnnnnnnnnnnnnnnnnnnnnnnnnnnnnnnnnnnnnnnnnnnnnnnnnnnnnnnnnnnnnnnnnnnnnnnnnnnnnnnnnnnnnnnnnnnnnnnnnnnnnnnnnnnnnnnnnnnnnnnnnnnnnnnnnnnnnnnnnnnnnnnnnnnnnnnnnnnnnnnnnnnnnnnnnnnnnnnnnnnnnnnnnnnnnnnnnnnnnnnnnnnnnnnnnnnnnnnnnnnnnnnnnnnnnnnnnnnnnnnnnnnnnnnnnnnnnnnnnnnnnnnnnnnnnnnnnnnnnnnnnnnnnnnnnnnnnnnnnnnnnnnnnnnnnnnnnnnnnnnnnnnnnnnnnnnnnnnnnnnnnnnnnnnnnnnnnnnnnnnnnnnnnnnnnnnnnnnnnnnnnnnnnnnnnnnnnnnnnnnnnnnnnnnnnnnnnnnnnnnnnnnnnnnnnnnnnnnnnnnnnnnnnnnnnnnnnnnnnnnnnnnnnnnnnnnnnnnnnnnnnnnnnnnnnnnnnnnnnnnnnnnnnnnnnnnnnnnnnnnnnnnnnnnnnnnnnnnnnnnnnnnnnnnnnnnnnnnnnnnnnnnnnnnnnnnnnnnnnnnnnnnnnnnnnnnnnnnnnnnnnnnnnnnnnnnnnnnnnnnnnnnnnnnnnnnnnnnnnnnnnnnnnnnnnnnnnnnnnnnnnnnnnnnnnnnnnnnnnnnnnnnnnnnnnnnnnnnnnnnnnnnnnnnnnnnnnnnnnnnnnnnnnnnnnnnnnnnnnnnnnnnnnnnnnnnnnnnnnnnnnnnnnnnnnnnnnnnnnnnnnnnnnnnnnnnnnnnnnnnnnnnnnnnnnnnnnnnnnnnnnnnnnnnnnnnnnnnnnnnnnnnnnnnnnnnnnnnnnnnnnnnnnnnnnnnnnnnnnnnnnnnnnnnnnnnnnnnnnnnnnnnnnnnnnnnnnnnnnnnnnnnnnnnnnnnnnnnnnnnnnnnnnnnnnnnnnnnnnnnnnnnnnnnnnnnnnnnnnnnnnnnnnnnnnnnnnnnnnnnnnnnnnnnnnnnnnnnnnnnnnnnnnnnnnnnnnnnnnnnnnnnnnnnnnnnnnnnnnnnnnnnnnnnnnnnnnnnnnnnnnnnnnnnnnnnnnnnnnnnnnnnnnnnnnnnnnnnnnnnnnnnnnnnnnnnnnnnnnnnnnnnnnnnnnnnnnnnnnnnnnnnnnnnnnnnnnnnnnnnnnnnnnnnnnnnnnnnnnnnnnnnnnnnnnnnnnnnnnnnnnnnnnnnnnnnnnnnnnnnnnnnnnnnnnnnnnnnnnnnnnnnnnnnnnnnnnnnnnnnnnnnnnnnnnnnnnnnnnnnnnnnnnnnnnnnnnnnnnnnnnnnnnnnnnnnnnnnnnnnnnnnnnnnnnnnnnnnnnnnnnnnnnnnnnnnnnnnnnnnnnnnnnnnnnnnnnnnnnnnnnnnnnnnnnnnnnnnnnnnnnnnnnnnnnnnnnnnnnnnnnnnnnnnnnnnnnnnnnnnnnnnnnnnnnnnnnnnnnnnnnnnnnnnnnnnnnnnnnnnnnnnnnnnnnnnnnnnnnnnnnnnnnnnnnnnnnnnnnnnnnnnnnnnnnnnnnnnnnnnnnnnnnnnnnnnnnnnnnnnnnnnnnnnnnnnnnnnnnnnnnnnnnnnnnnnnnnnnnnnnnnnnnnnnnnnnnnnnnnnnnnnnnnnnnnnnnnnnnnnnnnnnnnnnnnnnnnnnnnnnnnnnnnnnnnnnnnnnnnnnnnnnnnnnnnnnnnnnnnnnnnnnnnnnnnnnnnnnnnnnnnnnnnnnnnnnnnnnnnnnnnnnnnnnnnnnnnnnnnnnnnnnnnnnnnnnnnnnnnnnnnnnnnnnnnnnnnnnnnnnnnnnnnnnnnnnnnnnnnnnnnnnnnnnnnnnnnnnnnnnnnnnnnnnnnnnnnnnnnnnnnnnnnnnnnnnnnnnnnnnnnnnnnnnnnnnnnnnnnnnnnnnnnnnnnnnnnnnnnnnnnnnnnnnnnnnnnnnnnnnnnnnnnnnnnnnnnnnnnnnnnnnnnnnnnnnnnnnnnnnnnnnnnnnnnnnnnnnnnnnnnnnnnnnnnnnnnnnnnnnnnnnnnnnnnnnnnnnnnnnnnnnnnnnnnnnnnnnnnnnnnnnnnnnnnnnnnnnnnnnnnnnnnnnnnnnnnnnnnnnnnnnnnnnnnnnnnnnnnnnnnnnnnnnnnnnnnnnnnnnnnnnnnnnnnnnnnnnnnnnnnnnnnnnnnnnnnnnnnnnnnnnnnnnnnnnnnnnnnnnnnnnnnnnnnnnnnnnnnnnnnnnnnnnnnnnnnnnnnnnnnnnnnnnnnnnnnnnnnnnnnnnnnnnnnnnnnnnnnnnnnnnnnnnnnnnnnnnnnnnnnnnnnnnnnnnnnnnnnnnnnnnnnnnnnnnnnnnnnnnnnnnnnnnnnnnnnnnnnnnnnnnnnnnnnnnnnnnnnnnnnnnnnnnnnnnnnnnnnnnnnnnnnnnnnnnnnnnnnnnnnnnnnnnnnnnnnnnnnnnnnnnnnnnnnnnnnnnnnnnnnnnnnnnnnnnnnnnnnnnnnnnnnnnnnnnnnnnnnnnnnnnnnnnnnnnnnnnnnnnnnnnnnnnnnnnnnnnnnnnnnnnnnnnnnnnnnnnnnnnnnnnnnnnnnnnnnnnnnnnnnnnnnnnnnnnnnnnnnnnnnnnnnnnnnnnnnnnnnnnnnnnnnnnnnnnnnnnnnnnnnnnnnnnnnnnnnnnnnnnnnnnnnnnnnnnnnnnnnnnnnnnnnnnnnnnnnnnnnnnnnnnnnnnnnnnnnnnnnnnnnnnnnnnnnnnnnnnnnnnnnnnnnnnnnnnnnnnnnnnnnnnnnnnnnnnnnnnnnnnnnnnnnnnnnnnnnnnnnnnnnnnnnnnnnnnnnnnnnnnnnnnnnnnnnnnnnnnnnnnnnnnnnnnnnnnnnnnnnnnnnnnnnnnnnnnnnnnnnnnnnnnnnnnnnnnnnnnnnnnnnnnnnnnnnnnnnnnnnnnnnnnnnnnnnnnnnnnnnnnnnnnnnnnnnnnnnnnnnnnnnnnnnnnnnnnnnnnnnnnnnnnnnnnnnnnnnnnnnnnnnnnnnnnnnnnnnnnnnnnnnnnnnnnnnnnnnnnnnnnnnnnnnnnnnnnnnnnnnnnnnnnnnnnnnnnnnnnnnnnnnnnnnnnnnnnnnnnnnnnnnnnnnnnnnnnnnnnnnnnnnnnnnnnnnnnnnnnnnnnnnnnnnnnnnnnnnnnnnnnnnnnnnnnnnnnnnnnnnnnnnnnnnnnnnnnnnnnnnnnnnnnnnnnnnnnnnnnnnnnnnnnnnnnnnnnnnnnnnnnnnnnnnnnnnnnnnnnnnnnnnnnnnnnnnnnnnnnnnnnnnnnnnnnnnnnnnnnnnnnnnnnnnnnnnnnnnnnnnnnnnnnnnnnnnnnnnnnnnnnnnnnnnnnnnnnnnnnnnnnnnnnnnnnnnnnnnnnnnnnnnnnnnnnnnnnnnnnnnnnnnnnnnnnnnnnnnnnnnnnnnnnnnnnnnnnnnnnnnnnnnnnnnnnnnnnnnnnnnnnnnnnnnnnnnnnnnnnnnnnnnnnnnnnnnnnnnnnnnnnnnnnnnnnnnnnnnnnnnnnnnnnnnnnnnnnnnnnnnnnnnnnnnnnnnnnnnnnnnnnnnnnnnnnnnnnnnnnnnnnnnnnnnnnnnnnnnnnnnnnnnnnnnnnnnnnnnnnnnnnnnnnnnnnnnnnnnnnnnnnnnnnnnnnnnnnnnnnnnnnnnnnnnnnnnnnnnnnnnnnnnnnnnnnnnnnnnnnnnnnnnnnnnnnnnnnnnnnnnnnnnnnnnnnnnnnnnnnnnnnnnnnnnnnnnnnnnnnnnnnnnnnnnnnnnnnnnnnnnnnnnnnnnnnnnnnnnnnnnnnnnnnnnnnnnnnnnnnnnnnnnnnnnnnnnnnnnnnnnnnnnnnnnnnnnnnnnnnnnnnnnnnnnnnnnnnnnnnnnnnnnnnnnnnnnnnnnnnnnnnnnnnnnnnnnnnnnnnnnnnnnnnnnnnnnnnnnnnnnnnnnnnnnnnnnnnnnnnnnnnnnnnnnnnnnnnnnnnnnnnnnnnnnnnnnnnnnnnnnnnnnnnnnnnnnnnnnnnnnnnnnnnnnnnnnnnnnnnnnnnnnnnnnnnnnnnnnnnnnnnnnnnnnnnnnnnnnnnnnnnnnnnnnnnnnnnnnnnnnnnnnnnnnnnnnnnnnnnnnnnnnnnnnnnnnnnnnnnnnnnnnnnnnnnnnnnnnnnnnnnnnnnnnnnnnnnnnnnnnnnnnnnnnnnnnnnnnnnnnnnnnnnnnnnnnnnnnnnnnnnnnnnnnnnnnnnnnnnnnnnnnnnnnnnnnnnnnnnnnnnnnnnnnnnnnnnnnnnnnnnnnnnnnnnnnnnnnnnnnnnnnnnnnnnnnnnnnnnnnnnnnnnnnnnnnnnnnnnnnnnnnnnnnnnnnnnnnnnnnnnnnnnnnnnnnnnnnnnnnnnnnnnnnnnnnnnnnnnnnnnnnnnnnnnnnnnnnnnnnnnnnnnnnnnnnnnnnnnnnnnnnnnnnnnnnnnnnnnnnnnnnnnnnnnnnnnnnnnnnnnnnnnnnnnnnnnnnnnnnnnnnnnnnnnnnnnnnnnnnnnnnnnnnnnnnnnnnnnnnnnnnnnnnnnnnnnnnnnnnnnnnnnnnnnnnnnnnnnnnnnnnnnnnnnnnnnnnnnnnnnnnnnnnnnnnnnnnnnnnnnnnnnnnnnnnnnnnnnnnnnnnnnnnnnnnnnnnnnnnnnnnnnnnnnnnnnnnnnnnnnnnnnnnnnnnnnnnnnnnnnnnnnnnnnnnnnnnnnnnnnnnnnnnnnnnnnnnnnnnnnnnnnnnnnnnnnnnnnnnnnnnnnnnnnnnnnnnnnnnnnnnnnnnnnnnnnnnnnnnnnnnnnnnnnnnnnnnnnnnnnnnnnnnnnnnnnnnnnnnnnnnnnnnnnnnnnnnnnnnnnnnnnnnnnnnnnnnnnnnnnnnnnnnnnnnnnnnnnnnnnnnnnnnnnnnnnnnnnnnnnnnnnnnnnnnnnnnnnnnnnnnnnnnnnnnnnnnnnnnnnnnnnnnnnnnnnnnnnnnnnnnnnnnnnnnnnnnnnnnnnnnnnnnnnnnnnnnnnnnnnnnnnnnnnnnnnnnnnnnnnnnnnnnnnnnnnnnnnnnnnnnnnnnnnnnnnnnnnnnnnnnnnnnnnnnnnnnnnnnnnnnnnnnnnnnnnnnnnnnnnnnnnnnnnnnnnnnnnnnnnnnnnnnnnnnnnnnnnnnnnnnnnnnnnnnnnnnnnnnnnnnnnnnnnnnnnnnnnnnnnnnnnnnnnnnnnnnnnnnnnnnnnnnnnnnnnnnnnnnnnnnnnnnnnnnnnnnnnnnnnnnnnnnnnnnnnnnnnnnnnnnnnnnnnnnnnnnnnnnnnnnnnnnnnnnnnnnnnnnnnnnnnnnnnnnnnnnnnnnnnnnnnnnnnnnnnnnnnnnnnnnntggggtggctggggtggctacggaccctaccgcttcgggttcatgtgcggcggcgtccctggctgggcctaccccatgggctactggaacatgttcggcgcgggtctctacggcggcagctgcggtctcggcatgcctttcggcggtctctactactgctaaattggccgaccgcgcagccacctacctacctacctacctacctacctacctacctacctacctacctaccttcttacctctctggcgtcttgcaccaattaattaaggttcatcagctgtaccttggcgcattcgcctaaaattcaaaaccaaaatataatgctttctcctttttgaagcggggttttcgtgagtttgtgcgtcttgagccagattgtgcaatgttatcggaagcgtggcttcggcgatcggctgtagttcgtttggctggggattctgtatctgttcggtgtctggtatagtatctagactcctagaaatcctgaaatgttccatccagatatccaactaatctaactaatccaacaaaaatctgtcggtatcagtttccttttccacaccaatgttcagcatttgttaaaatgccgggcagtaagacatgtatttaagttcacctgttgtgcttgtgctagcctagcagcatgctactacagtagtacctacgtccactcggtttgaggtttactttttccgaataaactgccacaattgtgcttttgtatgaaccatatttcggagccgttggcgctactgtattcgccgtttggcagcgattgaggcgcgccgacaagaagcgcatcaatcactaccacttacttcatcgccgcgagaattcgcccgcaaattcggcgactttgccaaacgaacctccccgatcgaagcagactcgttcgttccaacactgcgcccgtcatcttcggacccacaacacgatctgcctccacttgagcaagtcgagtaccacccgatctccgaattcagcgccgaaccgcaccgcatcacagccatgaagttcagcaccttcctcgttgccgctcttgccgtcgttggtgtcgtcgccgccgccgcccaacctgctgctgccggcaatctgccggccgtcaaatccgccgccgaagcgctccagaagcttgaagcgtccgagttgcccgatggtgtcacgctcatgggcactagtgagaagatcgacccgcctgcgggtgccgccgccgcgatcgccgccaaggaagctgacaacaagcacgatggtgacgccgacaagaaggagcagtacggcggctggggtctgggtcttggcgctggctggggtctcggcggcggctggggcaactggggtggctggggtggctacggaccctaccgcttcgggttcatgtgcggcggcgtccctggctgggcctaccccatgggctactggaacatgttcggcgcgggtctctacggcggcagctgcggtctcggcatgccattcggcggtctctactactgctaaattggccgaccgcgcagccacctacctacctacctacctacctacctaccttcttacctctctggcgtcttgcaccaattaattaaggttcatcagctgtaccttggcgcattcgcctagaattcaaaaccaaaatataatgctttctcctttttgaagcggggttttcgtgagtttgtgcgtcttgagccagattgtgcaatgttatcggaagcgtggcttcggcgatcggctgtagttcgtttggctggggattctgtatctgttcggtgtctggtatagtatctagactcctagaaatcctgaaatgttccatccagatatccaactaatccaactaatccaacaaaaatctgtcggtatcagtttccttttccacaccaatgttcagcatttgttaaaatgccgggcagtaagacatgtatttaagttcacctgttgtgcttgtgctagcctagcagcatgctactacagtagtacctacgtccactcggttttaggtttactttttccgaataaactgccacaattgtgcttttgtatgaaccatatttcggagccgttggcgctactgtattcgccgtttggcagcgattgaggcgcgccgacaagaagcgcatcaatcactaccacttacttcatcgccgcgagaattcgcccgcaaattcggcgactttgccaaacgaacctccccgatcgaagcagactcgttcgttccaacactgcgcccgccttttcgccgtcatcttcggacccacaacacgatctgcctccacttgagcaagtcgagtaccacccgatctccgaattcagcgccgaaccgcaccgcatcacagccatgaagttcagcaccttcctcgttgccgctcttgccgtcgttggtgtcgtcgccgccgccgcccaacctgctgctgccggcaatctgccggccgtcaaatccgccgccgaagcgctccagatgcttgaagcgtccgagttgcccgatggtgtcacgctcatgggcactagtgagaagatcgacccgcctgcgggtgccgccgccgcgatcgccgccaaggaagctgacaacaagcacgatggtgacgccgacaagaaggagcagtacggcggctggggtctgggtcttggcgctggctggggtctcggcggcggctggggcaactggggtggctggggtggctacggaccctaccgcttcgggttcatgtgcggcggcgtccctggctgggcctaccccatgggctactggaacatgttcggcgcgggtctctacggcggcagctgcggtctcggcatgcctttcggcggtctctactactgctaaattggccgaccgcgtagccacctacctacctacctacctacctacctacctacctacctacctacctacctacctacctaccttcttacctctctggcgtcttgcaccaattaattaaggttcatcagctgtaccttggcgcattcgcctaaaattcaaaaccaaaatataatgctttctcctttttgaagcggggttttcgtgagtttgtgcgtcttgagccagattgtgcaatgttatcggaagcgtggcttcggcgatcggctgtagttcgtttggctggggattctgtatctgttcggtgtctggtatagtatctagactcctagaaatcctgaaatgttccatccagatatccaactaatttaactaatccaacaaaaatctgtcggtatcagtttccttttccacaccaatgttcagcatttgttaaaatgccgggcagtaagacatgtatttaagttcacctgttgtgcttgtgctagcctagcagcatgctactacagtagtacctacgtccactcggttttaggtttactttttccgaataaactgccacaattgtgcttttgtatgaaccatatttcggagccgttggcgctactgtattcgccgtttggcagcgattgaggcgcgccgacaagaagcgcatcaatcactaccacttacttcatcgccgcgagaattcgcccgcaaattcggcgactttgccaaacgaacctccccgatcgaagcagactcgttcgttccaacactgcgcccgccttttcgccgtcatcttcggacccacaacacgatctgcctccacttgagcaagtcgagtaccacccgatctccgaattcagcgccgaaccgcaccgcatcacagccatgaagttcagcaccttcctcgttgccgctcttgccgtcgttggtgtcgtcgccgccgccgcccaacctgctgctgccggcaatctgccggccgtcaaatccgccgccgaagcgctccagatgcttgaagcgtccgagttgcccgatggtgtcacgctcatgggcactagtgagaagatcgacccgcctgcgggtgccgccgccgcgatcgccgccaaggaagctgacaacaagcacgatggtgacgccgacaagaaggagcagtacggcggctggggtctgggtcttggcgctggctggggtctcggcggcggctggggcaactggggtggctggggtggctacggaccctaccgcttcgggttcatgtgcggcggcgtccctggctgggcctaccccatgggctactggaacatgttcggcgcgggtctctacggcggcagctgcggtctcggcatgcctttcggcggtctctactactgctaaattggccgaccgcgcagccacctacccacctacctacctacctacctacctacctacctaccttcttacctctctggcgtcttgcaccaattaattaaggttcatcagctgtaccttggcgcattcgcctagaattcaaaaccaaaatataatgctttctcctttttgaagcggggttttcgtgagtttgtgcgtcttgagccagattgtgcaatgttatcggaagcgtggcttcggcgatcggctgtagttcgtttggctggggattctgtatctgttcggtgtctggtatagtatctagactcctagaaatcctgaaatgttccatccagatatccaactaatttaactaatccaacaaaaatctgtcggtatcagtttccttttccacaccaatgttcagcatttgttaaaatgccgggcagtaagacatgtatttaagttcacctgttgtgcttgtgctagcctagcagcatgctactacagtagtacctacgtccactcggtttgaggtttactttttccgaataaactgccacaattgtgcttttgtatgaaccatatttcggagccgttggcgctactgtattcgccgtttggcagcgattgaggcgcgccgacaagaagcgcatcaatcactaccacttacttcatcgccgcgagaattcgcccgcaaattcggcgactttgccaaacgaacctccccgatcgaagcagactcgttcgttccaacactgcgcccgccttttcgccgtcatcttcggacccacaacacgatctgcctccacttgagcaagtcgagtaccacccgatctccgaattcagcgccgaaccgcaccgcatcacagccatgaagttcagcaccttcctcgttgccgctcttgccgtcgttggtgtcgtcgccgccgccgcccaacctgctgctgccggcaatctgccggccgtcaaatccgccgccgaagcgctccagaagcttgaagcgtccgagttgcccgatggtgtcacgctcatgggcactagtgagaagatcgacccgcctgcgggtgccgccgccgcgatcgccgccaaggaagctgacaacaagcacgatggtgacgccgacaagaaggagcagtacggcggctggggtctgggtcttggcgctggctggggcctctggggtggctgnnnnnnnnnnnnnnnnnnnnnnnnnnnnnnnnnnnnnnnnnnnnnnnnnnnnnnnnnnnnnnnnnnnnnnnnnnnnnnnnnnnnnnnnnnnnnnnnnnnnnnnnnnnnnnnnnnnnnnnnnnnnnnnnnnnnnnnnnnnnnnnnnnnnnnnnnnnnnnnnnnnnnnnnnnnnnnnnnnnnnnnnnnnnnnnnnnnnnnnnnnnnnnnnnnnnnnnnnnnnnnnnnnnnnnnnnnnnnnnnnnnnnnnnnnnnnnnnnnnnnnnnnnnnnnnnnnnnnnnnnnnnnnnnnnnnnnnnnnnnnnnnnnnnnnnnnnnnnnnnnnnnnnnnnnnnnnnnnnnnnnnnnnnnnnnnnnnnnnnnnnnnnnnnnnnnnnnnnnnnnnnnnnnnnnnnnnnnnnnnnnnnnnnnnnnnnnnnnnnnnnnnnnnnnnnnnnnnnnnnnnnnnnnnnnnnnnnnnnnnnnnnnnnnnnnnnnnnnnnnnnnnnnnnnnnnnnnnnnnnnnnnnnnnnnnnnnnnnnnnnnnnnnnnnnnnnnnnnnnnnnnnnnnnnnnnnnnnnnnnnnnnnnnnnnnnnnnnnnnnnnnnnnnnnnnnnnnnnnnnnnnnnnnnnnnnnnnnnnnnnnnnnnnnnnnnnnnnnnnnnnnnnnnnnnnnnnnnnnnnnnnnnnnnnnnnnnnnnnnnnnnnnnnnnnnnnnnnnnnnnnnnnnnnnnnnnnnnnnnnnnnnnnnnnnnnnnnnnnnnnnnnnnnnnnnnnnnnnnnnnnnnnnnnnnnnnnnnnnnnnnnnnnnnnnnnnnnnnnnnnnnnnnnnnnnnnnnnnnnnnnnnnnnnnnnnnnnnnnnnnnnnnnnnnnnnnnnnnnnnnnnnnnnnnnnnnnnnnnnnnnnnnnnnnnnnnnnnnnnnnnnnnnnnnnnnnnnnnnnnnnnnnnnnnnnnnnnnnnnnnnnnnnnnnnnnnnnnnnnnnnnnnnnnnnnnnnnnnnnnnnnnnnnnnnnnnnnnnnnnnnnnnnnnnnnnnnnnnnnnnnnnnnnnnnnnnnnnnnnnnnnnnnnnnnnnnnnnnnnnnnnnnnnnnnnnnnnnnnnnnnnnnnnnnnnnnnnnnnnnnnnnnnnnnnnnnnnnnnnnnnnnnnnnnnnnnnnnnnnnnnnnnnnnnnnnnnnnnnnnnnnnnnnnnnnnnnnnnnnnnnnnnnnnnnnnnnnnnnnnnnnnnnnnnnnnnnnnnnnnnnnnnnnnnnnnnnnnnnnnnnnnnnnnnnnnnnnnnnnnnnnnnnnnnnnnnnnnnnnnnnnnnnnnnnnnnnnnnnnnnnnnnnnnnnnnnnnnnnnnnnnnnnnnnnnnnnnnnnnnnnnnnnnnnnnnnnnnnnnnnnnnnnnnnnnnnnnnnnnnnnnnnnnnnnnnnnnnnnnnnnnnnnnnnnnnnnnnnnnnnnnnnnnnnnnnnnnnnnnnnnnnnnnnnnnnnnnnnnnnnnnnnnnnnnnnnnnnnnnnnnnnnnnnnnnnnnnnnnnnnnnnnnnnnnnnnnnnnnnnnnnnnnnnnnnnnnnnnnnnnnnnnnnnnnnnnnnnnnnnnnnnnnnnnnnnnnnnnnnnnnnnnnnnnnnnnnnnnnnnnnnnnnnnnnnnnnnnnnnnnnnnnnnnnnnnnnnnnnnnnnnnnnnnnnnnnnnnnnnnnnnnnnnnnnnnnnnnnnnnnnnnnnnnnnnnnnnnnnnnnnnnnnnnnnnnnnnnnnnnnnnnnnnnnnnnnnnnnnnnnnnnnnnnnnnnnnnnnnnnnnnnnnnnnnnnnnnnnnnnnnnnnnnnnnnnnnnnnnnnnnnnnnnnnnnnnnnnnnnnnnnnnnnnnnnnnnnnnnnnnnnnnnnnnnnnnnnnnnnnnnnnnnnnnnnnnnnnnnnnnnnnnnnnnnnnnnnnnnnnnnnnnnnnnnnnnnnnnnnnnnnnnnnnnnnnnnnnnnnnnnnnnnnnnnnnnnnnnnnnnnnnnnnnnnnnnnnnnnnnnnnnnnnnnnnnnnnnnnnnnnnnnnnnnnnnnnnnnnnnnnnnnnnnnnnnnnnnnnnnnnnnnnnnnnnnnnnnnnnnnnnnnnnnnnnnnnnnnnnnnnnnnnnnnnnnnnnnnnnnnnnnnnnnnnnnnnnnnnnnnnnnnnnnnnnnnnnnnnnnnnnnnnnnnnnnnnnnnnnnnnnnnnnnnnnnnnnnnnnnnnnnnnnnnnnnnnnnnnnnnnnnnnnnnnnnnnnnnnnnnnnnnnnnnnnnnnnnnnnnnnnnnnnnnnnnnnnnnnnnnnnnnnnnnnnnnnnnnnnnnnnnnnnnnnnnnnnnnnnnnnnnnnnnnnnnnnnnnnnnnnnnnnnnnnnnnnnnnnnnnnnnnnnnnnnnnnnnnnnnnnnnnnnnnnnnnnnnnnnnnnnnnnnnnnnnnnnnnnnnnnnnnnnnnnnnnnnnnnnnnnnnnnnnnnnnnnnnnnnnnnnnnnnnnnnnnnnnnnnnnnnnnnnnnnnnnnnnnnnnnnnnnnnnnnnnnnnnnnnnnnnnnnnnnnnnnnnnnnnnnnnnnnnnnnnnnnnnnnnnnnnnnnnnnnnnnnnnnnnnnnnnnnnnnnnnnnnnnnnnnnnnnnnnnnnnnnnnnnnnnnnnnnnnnnnnnnnnnnnnnnnnnnnnnnnnnnnnnnnnnnnnnnnnnnnnnnnnnnnnnnnnnnnnnnnnnnnnnnnnnnnnnnnnnnnnnnnnnnnnnnnnnnnnnnnnnnnnnnnnnnnnnnnnnnnnnnnnnnnnnnnnnnnnnnnnnnnnnnnnnnnnnnnnnnnnnnnnnnnnnnnnnnnnnnnnnnnnnnnnnnnnnnnnnnnnnnnnnnnnnnnnnnnnnnnnnnnnnnnnnnnnnnnnnnnnnnnnnnnnnnnnnnnnnnnnnnnnnnnnnnnnnnnnnnnnnnnnnnnnnnnnnnnnnnnnnnnnnnnnnnnnnnnnnnnnnnnnnnnnnnnnnnnnnnnnnnnnnnnnnnnnnnnnnnnnnnnnnnnnnnnnnnnnnnnnnnnnnnnnnnnnnnnnnnnnnnnnnnnnnnnnnnnnnnnnnnnnnnnnnnnnnnnnnnnnnnnnnnnnnnnnnnnnnnnnnnnnnnnnnnnnnnnnnnnnnnnnnnnnnnnnnnnnnnnnnnnnnnnnnnnnnnnnnnnnnnnnnnnnnnnnnnnnnnnnnnnnnnnnnnnnnnnnnnnnnnnnnnnnnnnnnnnnnnnnnnnnnnnnnnnnnnnnnnnnnnnnnnnnnnnnnnnnnnnnnnnnnnnnnnnnnnnnnnnnnnnnnnnnnnnnnnnnnnnnnnnnnnnnnnnnnnnnnnnnnnnnnnnnnnnnnnnnnnnnnnnnnnnnnnnnnnnnnnnnnnnnnnnnnnnnnnnnnnnnnnnnnnnnnnnnnnnnnnnnnnnnnnnnnnnnnnnnnnnnnnnnnnnnnnnnnnnnnnnnnnnnnnnnnnnnnnnnnnnnnnnnnnnnnnnnnnnnnnnnnnnnnnnnnnnnnnnnnnnnnnnnnnnnnnnnnnnnnnnnnnnnnnnnnnnnnnnnnnnnnnnnnnnnnnnnnnnnnnnnnnnnnnnnnnnnnnnnnnnnnnnnnnnnnnnnnnnnnnnnnnnnnnnnnnnnnnnnnnnnnnnnnnnnnnnnnnnnnnnnnnnnnnnnnnnnnnnnnnnnnnnnnnnnnnnnnnnnnnnnnnnnnnnnnnnnnnnnnnnnnnnnnnnnnnnnnnnnnnnnnnnnnnnnnnnnnnnnnnnnnnnnnnnnnnnnnnnnnnnnnnnnnnnnnnnnnnnnnnnnnnnnnnnnnnnnnnnnnnnnnnnnnnnnnnnnnnnnnnnnnnnnnnnnnnnnnnnnnnnnnnnnnnnnnnnnnnnnnnnnnnnnnnnnnnnnnnnnnnnnnnnnnnnnnnnnnnnnnnnnnnnnnnnnnnnnnnnnnnnnnnnnnnnnnnnnnnnnnnnnnnnnnnnnnnnnnnnnnnnnnnnnnnnnnnnnnnnnnnnnnnnnnnnnnnnnnnnnnnnnnnnnnnnnnnnnnnnnnnnnnnnnnnnnnnnnnnnnnnnnnnnnnnnnnnnnnnnnnnnnnnnnnnnnnnnnnnnnnnnnnnnnnnnnnnnnnnnnnnnnnnnnnnnnnnnnnnnnnnnnnnnnnnnnnnnnnnnnnnnnnnnnnnnnnnnnnnnnnnnnnnnnnnnnnnnnnnnnnnnnnnnnnnnnnnnnnnnnnnnnnnnnnnnnnnnnnnnnnnnnnnnnnnnnnnnnnnnnnnnnnnnnnnnnnnnnnnnnnnnnnnnnnnnnnnnnnnnnnnnnnnnnnnnnnnnnnnnnnnnnnnnnnnnnnnnnnnnnnnnnnnnnnnnnnnnnnnnnnnnnnnnnnnnnnnnnnnnnnnnnnnnnnnnnnnnnnnnnnnnnnnnnnnnnnnnnnnnnnnnnnnnnnnnnnnnnnnnnnnnnnnnnnnnnnnnnnnnnnnnnnnnnnnnnnnnnnnnnnnnnnnnnnnnnnnnnnnnnnnnnnnnnnnnnnnnnnnnnnnnnnnnnnnnnnnnnnnnnnnnnnnnnnnnnnnnnnnnnnnnnnnnnnnnnnnnnnnnnnnnnnnnnnnnnnnnnnnnnnnnnnnnnnnnnnnnnnnnnnnnnnnnnnnnnnnnnnnnnnnnnnnnnnnnnnnnnnnnnnnnnnnnnnnnnnnnnnnnnnnnnnnnnnnnnnnnnnnnnnnnnnnnnnnnnnnnnnnnnnnnnnnnnnnnnnnnnnnnnnnnnnnnnnnnnnnnnnnnnnnnnnnnnnnnnnnnnnnnnnnnnnnnnnnnnnnnnnnnnnnnnnnnnnnnnnnnnnnnnnnnnnnnnnnnnnnnnnnnnnnnnnnnnnnnnnnnnnnnnnnnnnnnnnnnnnnnnnnnnnnnnnnnnnnnnnnnnnnnnnnnnnnnnnnnnnnnnnnnnnnnnnnnnnnnnnnnnnnnnnnnnnnnnnnnnnnnnnnnnnnnnnnnnnnnnnnnnnnnnnnnnnnnnnnnnnnnnnnnnnnnnnnnnnnnnnnnnnnnnnnnnnnnnnnnnnnnnnnnnnnnnnnnnnnnnnnnnnnnnnnnnnnnnnnnnnnnnnnnnnnnnnnnnnnnnnnnnnnnnnnnnnnnnnnnnnnnnnnnnnnnnnnnnnnnnnnnnnnnnnnnnnnnnnnnnnnnnnnnnnnnnnnnnnnnnnnnnnnnnnnnnnnnnnnnnnnnnnnnnnnnnnnnnnnnnnnnnnnnnnnnnnnnnnnnnnnnnnnnnnnnnnnnnnnnnnnnnnnnnnnnnnnnnnnnnnnnnnnnnnnnnnnnnnnnnnnnnnnnnnnnnnnnnnnnnnnnnnnnnnnnnnnnnnnnnnnnnnnnnnnnnnnnnnnnnnnnnnnnnnnnnnnnnnnnnnnnnnnnnnnnnnnnnnnnnnnnnnnnnnnnnnnnnnnnnnnnnnnnnnnnnnnnnnnnnnnnnnnnnnnnnnnnnnnnnnnnnnnnnnnnnnnnnnnnnnnnnnnnnnnnnnnnnnnnnnnnnnnnnnnnnnnnnnnnnnnnnnnnnnnnnnnnnnnnnnnnnnnnnnnnnnnnnnnnnnnnnnnnnnnnnnnnnnnnnnnnnnnnnnnnnnnnnnnnnnnnnnnnnnnnnnnnnnnnnnnnnnnnnnnnnnnnnnnnnnnnnnnnnnnnnnnnnnnnnnnnnnnnnnnnnnnnnnnnnnnnnnnnnnnnnnnnnnnnnnnnnnnnnnnnnnnnnnnnnnnnnnnnnnnnnnnnnnnnnnnnnnnnnnnnnnnnnnnnnnnnnnnnnnnnnnnnnnnnnnnnnnnnnnnnnnnnnnnnnnnnnnnnnnnnnnnnnnnnnnnnnnnnnnnnnnnnnnnnnnnnnnnnnnnnnnnnnnnnnnnnnnnnnnnnnnnnnnnnnnnnnnnnnnnnnnnnnnnnnnnnnnnnnnnnnnnnnnnnnnnnnnnnnnnnnnnnnnnnnnnnnnnnnnnnnnnnnnnnnnnnnnnnnnnnnnnnnnnnnnnnnnnnnnnnnnnnnnnnnnnnnnnnnnnnnnnnnnnnnnnnnnnnnnnnnnnnnnnnnnnnnnnnnnnnnnnnnnnnnnnnnnnnnnnnnnnnnnnnnnnnnnnnnnnnnnnnnnnnnnnnnnnnnnnnnnnnnnnnnnnnnnnnnnnnnnnnnnnnnnnnnnnnnnnnnnnnnnnnnnnnnnnnnnnnnnnnnnnnnnnnnnnnnnnnnnnnnnnnnnnnnnnnnnnnnnnnnnnnnnnnnnnnnnnnnnnnnnnnnnnnnnnnnnnnnnnnnnnnnnnnnnnnnnnnnnnnnnnnnnnnnnnnnnnnnnnnnnnnnnnnnnnnnnnnnnnnnnnnnnnnnnnnnnnnnnnnnnnnnnnnnnnnnnnnnnnnnnnnnnnnnnnnnnnnnnnnnnnnnnnnnnnnnnnnnnnnnnnnnnnnnnnnnnnnnnnnnnnnnnnnnnnnnnnnnnnnnnnnnnnnnnnnnnnnnnnnnnnnnnnnnnnnnnnnnnnnnnnnnnnnnnnnnnnnnnnnnnnnnnnnnnnnnnnnnnnnnnnnnnnnnnnnnnnnnnnnnnnnnnnnnnnnnnnnnnnnnnnnnnnnnnnnnnnnnnnnnnnnnnnnnnnnnnnnnnnnnnnnnnnnnnnnnnnnnnnnnnnnnnnnnnnnnnnnnnnnnnnnnnnnnnnnnnnnnnnnnnnnnnnnnnnnnnnnnggtgaaaaatatttatcctgtatgagccatgataagagggcggtttagatacaggaaaagtgtctaacttgtatggtatagatcaaagacatgaccgccttttgacagaaaaatgcaactttgttataaaaaaagagcgcgtgtataccatacctcaactaagatataagctctgcaccttgtgtcttgcatctatcagccttcaatcgtcacgctgtcgtcgcttagactggtgggcatcgtcgccctcgctgttatctcctcttccccgcccctccgtatctctgctggcgccgactgtggtcctccacgcatgaaaccatcttctactgcgatgacgacaacataatatcattcacctgtgccgaagtgagggcttgtagcaggaaatagactcgctgttgccttggcacacaagtcaacgcaaaaaaactatggccttctttgagccgccccggccctcgctgcgctgtgatagaacgtcgtttcactgtccttccagaccctagttttcttccacacgaaggacactttggtcacacggtggcgtctccattccacttgtttgttctcgctctgctcagaacagtcactaccgattcggttatgatggtccaacaacactggtatgacgcttgctagtatacttcagatctatacatacgggataacgatgttgatagcttgtatcagacacgttaagataactttgcgaccaaaacaagattgagcgtgctacaaagcacactagctattcagcacatgacataggacgactgggaacaacaacgtttaaacatcatcatccttcatttatatggtttattattgacatatacgcgcaattaattgggcgataactttgaccgcaacattgcatgaagtgggactcgctgaatgacgtgccttgccctggtatgtagcttgctggaaacgttgctcgtagggagctggatgcgcggatagaccgaagggttgagaaagcccgcgtcaacccggcacgtggcccagcaccagtcgaagctctagcaactatagtcgaagcacgtatatacacgattagacacaagagtaatttgaatagcacacaatagccttgaggggcacctttatccacatcttcccgcactgttgtcgccgaacaaaagccagaagtcctttggcttacgtttcgcaggctgcggcagacagccttggcaccgagcgaagctctatcaactgcaatagcaacatttttttttgaaattagctaagtgagtggcgtagatagtagttatagcaatgaaccgcaccttttccttcgctatcagcatcctcagctaatcaaaccgcagcccggagagctggtgcgctgagaccagcttggcgctacggaagctgctgtgacgtcggtcgaagcactcgcggctgcattagtagcatgtacatacacgattagacacaaacataacgtgaagaatacaagatgtcattgctcaccgttttctgtcgatccgcggtttccggtactgttgtggcagcagcttcagtgcaacggagctgtcgaagattgttactactcttctgcatcatttacgcatgttagcaaaatgccagcagtattacaaacatcgcaatcacttacctagtcaagcgtgactagtcggaacatcggtccctcagctccgacgaagcagccggttccttcataccccctctgggtctttcgcggcgcacgtgagagtggagtcttgctcttagatttcccccattgctgggttagatcaatccagcgcgcagtaaatctggtcgttgttcttggtcggcaagttctggaatgagattgaacgagtggcgtcggtgattctaaatatcgtgtggtctacctcatgcactgtcttattttgagacactttagtggtacagtcaaacctgtttatatgaggccctgttggtgaccatctactacaatgactcatataaaatggactcagttaaaaaaatatgtggtgcacgtaaagaaatcgtgcatagttcgctgccgctttgccttcaccgtagtctctcgaaccaaagcggtcacggtctgtaaagctcttcgttctctgtcactctgctctccgcattgcagcagaaatgcagccagctccatgcagtgtctcagagcaatggcaggttgaactgcgggttcctgttcctcctcttcctcctgctcgtcctgcgaaactgcatcacttcctgccgcttcgtccactagcacatctggctcgtgcacaggaacgtctacgtccactgccagatactcactagcgctaacagcgccctcccacctcgatagcatcgccgttaactcctccatctcgttgctggatacctcctcaatgtaatccgtgtcagcacgggtccttcctagcatctttcctcccaaaatgcgagtcttgacccagcaatttgtaattgtcgttggcgtcacacccgcccaagcatcaatggacaattggacagcttccagtacgttgagcttgcgtgtaatgttagcttcaagtgcatccaaacaccaccgcccaaaatactttcgctaccgagccttgaacgacccgataatacctgaataaaaaaaacaccgtaatagagttggttcgtttaggctacaccacaatatagataaaatatttacctgcatccagcggctgtacggcggatgtcatgttaggagggaggaagtgaacagtcacatgagtcaggtttcgtagaagcttttggcatgaaacattgtcgactagaagtaggaccttgcgattggcggccgccattctcatgttgaagaggtgcagccattcgtcaaaaatgacggatgtcatccaggcgttcttggaggacttgtataatataggtttacctttaatcgccgctccctttttaaagcacctcgggttcttggccgtaccgatgactattgggtcgagcttgtcggagccagtcgcgttgcagcagaaggccaaagtcaaacgttgcttctcctttttcttgcccttgcgaatagtcgtagctagcgttcgattaggcgctaagcgatagaaaaacgccgtttcgtcgaagttgaacacattctcgggtgtaaactgcgccaccaactcttgtagctctagcctcgcatctcgcacttcatcagcttctacagcgccaccttcgccgtgtagcgtatgggagcggatcccattgcgcttcttaaagcttggaagccagccgttgctgagtcggagctgcgttgcatcgatgcctaagcgctccgccagctcatgcgccttcagcaggagcacgtcgtccgccatcgccgttttgcttcgttctgaaagaaaaattccctcagttcccgctcgaacggagggaatttcactcgccgccgcttggtcgcactcaggtcgacgtggctgaagtaggaagaaggcaggttgcgcagtcgcgcgagtgtggcacggctggcccgggccttgcaggttgcgtagatccactcggcgagcatggggttgttcatgccaggattctgcttgagctttaggtgcacttggagcttttgttctagcgtcagacaggtgcgaggagacatggcgagccaagaaggcttgcggtaggcgttgagtattgagcagtggtgctttgaagagtgtgtggccgtgagcagtgtgaatcaaataaacaggtgagacctaatttggtcccaaaaaatgtgactcatataccttgtatgcatataaacagagatcatacaaaaactaagtgaaatatttggtagcgacaaagcctgcatcaaataaacggcatggctcaaatagagaggatcatataaacaggtttgactgtatttttcagcactcgggggtgggggagtctatccggctccccgaaccctttttgacttaaaatttgtatgttcatacctaaaacaagataaaatccttatcgtgtctaatacaagataagcattttttgtaatcgtgtctaatacaggctctcgcgttcaaggggttaaccacataaatcgatatagctatgtcttgtgcttcttttaagctactaacggcttacaaatgttgagaactcaacaagtgacgccggtccgaaaaaatatttcctttttcggacccccaaaatccctgatattatttggggcgtgtgagctcaatttttcttcaattttggctttttgtacatttttggaatgcttgagttaatgataatcgagccgaaatattttaacttattctacgagtgattttcactttcaaaattgtgatgtccggttatgttcgaaaattgatagggcaacttaaaacgcgattatctcgataactctataaggtggataagtatcattgtgtcagccgccgtctcaaatgctgaacattgatgtagaccgacagtttcgtgggatttttgctggattagttggactggttacccgggcccagagccaagcccgttggtcccggggggagggtcgtagttcgtaagaaaggttaattgtggtgtattagttgcgtttaccgtagttgtggagtattgtgtgctagccacagtaagcgagtatacgcccaggagcctaagtaagaaaggttaaatgtacttttttcaaattctctctccccacaaagctacattaaaaacagtgaagacgtaagcatattctaaaaccctgttcgaatgaaatatgaccaaaggccctaattatcaagacgcgggattaaaaaaaaatgaccaccgcagcaagaagctcaacttgttgctaagcacaccagtgataaaaatgaaggacagaaatttaactcgaccagctgaagacatgtccccgaccggataaaccggaacttccggtttatctctctaaatgctacataacctccgaacagccccacgcagtacttgtccatctctcggttagctattggttcttgacgcgtagtctttacttaatgctgaatttatcggagtcactggccgcacacttgggattacaacatttgtttttctctcagtaagcttaccagctcgtgtcgaggcttggattcgacattacatcgagctgttcaacgcggattcaattgtctgttgcaatcgtagtcgagatgtacttgatgatcatcacaccaacaagcatgtggggcaatttgatttctttatttgccaaatgaaaaaaaatcacaagcgacttgggcgcgcctcacttgcggcgcacctgtcgcagtaataaatatcttctctgagcttacttgaacgctctagcatatatcgagattgtcttgcgttcttcgggttcggtcacaagatgcgcctgcacaggatccaggttcgcagcgagtagattatcttgcagtcggacgcctttacgcacctgcttgtagacccttccaatgagacttgtcctttgggtcgtccttgaaatcgtgatacagagtatcgacaacttcgctaatattgtcagagcttaatgcttgttaggtcaagaccgcggcaattgcagacgaacacattggtgctgcacgtagttgtggcccgattggccttttctagctgctgcctcctgttcagcaaattctaaaatggtattaagtgagccggccccgctcggatcgggaacatcatggtctatacctccatcttctggcctatacctttacctcacgggactcccctgagttatgtgtccaacactagttattccgcataccaatgcttagataaatcgaccctatacaacggtaagtcattcgaaagcatacgaacctcaagatattttatttcaatgcaaaacttaaaaaaaaaaattctggcgataccggtatctgacatcaaacaggtagtaacgacagttcttacgaactgcgaatatctggatggataatttcaggacttctaggcttctagctaccataccagacaccgaatacatacagaatccccagccaaacgaactgcaaccgatcgccgaagacgttggcgctactgtatttgccgtttggcagcgattgaggcgcgccgacaagaagcgcatcaatcactaccacttacttcatcgccgcgagaattcgcccgcaaattcggcgactttgccaaacgaacctccccgatcgaagcagactcgttcgttccaacactgcgcccgccttttcgccgtcatcttcggacccacaacacgatctgcctccacttgagcaagtcgagtaccacccgatctccgaattcagcgccgaaccgcaccgcatcacagccatgaagttcagcaccttcctcgttgccgctcttgccgtcgttggtgtcgtcgccgccgccgcccaacctgctgctgccggcaatctgccggccgtcaaatccgccgccgaagcgctccagatgcttgaagcgtccgagttgcccgatggtgtcacgctcatgggcactagtgagaagatcgacccgcctgcgggtgccgccgccgcgatcgccgccaaggaagctgacaacaagcacgatggtgacgccgacaagaaggagcagtacggcggctggggtctgggtcttggcgctggctggggtctcggcggcggctggggcaactggggtggctggggtggctacggaccctaccgcttcgggttcatgtgcggcggcgtccctggctgggcctaccccatgggctactggaacatgttcggcgcgggtctctacggcggcagctgcggtctcggcatgcctttcggcggtctctactactgctaaattggccgaccgcgcagccacctacctacctacctacctacctacctacctacctacctacctacctacctacctacctacctacctacctaccttcttacctctctggcgtcttgcaccaattaattaaggttcatcagctgtaccttggcgcattcgcctagaattcaaaaccaaaatataatgctttctcctttttgaagcggggttttcgtgagtttgtgcgtcttgagccagattgtgcaatgttatcggaagcgtggcttcggcgatcggctgtagttcgtttggctggggattctgtatctgttcggtgtctggtatagtatctagactcctagaaatcctgaaatgttccatccagatatccaactaatttaactaatccaacaaaaatctgtcggtatcagtttccttttccacaccaatgttcagcatttgttaaaatgccgggcagtaagacatgtatttaagttcacctgttgtgcttgtgctagcctagcagcatgctactacagtagtacctacgtccactcggtttgaggtttactttttccgaataaactgccacaattgtgcttttgtatgaaccatatttcggagccgttggcgctactgtattcgccgtttggcagcgattgaggcgcgccgacaagaagcgcatcaatcactaccacttacttcatcgccgcgagaattcgcccgcaaattcggcgactttgccaaacgaacctccccgatcgaagcagactcgttcgttccaacactgcgcccgccttttcgccgtcatcttcggacccacaacacgatctgcctccacttgagcaagtcgagtaccacccgatctccgaattcagcgccgaaccgcaccgcatcacagccatgaagttcagcaccttcctcgttgccgctcttgccgtcgttggtgtcgtcgccgccgccgcccaacctgctgctgccggcaatctgccggccgtcaaatccgccgccgaagcgctccagaagcttgaagcgtccgagttgcccgatggtgtcacgctcacgggcaccagtgagaagatcgacccgcctgcgggtgccgccgccgcgatcgccgccaaggaagctgacaacaagcacgatggtgacgccgacaagaaggagcagtacggcggctggggtctgggtcttggcgctggctggggtctcggcggcggctggggcaactggggtggctggggtggctacggaccctaccgcttcgggttcatgtgcggcggcgtccctggctgggcctaccccatgggctactggaacatgttcggcgcgggtctctacggcggcagctgcggtctcggcatgcctttcggcggtctctactactgctaaattggccgaccgcgcagctacctacctacctacctaccttcttacctctctggcgtcttgcaccaattaattaaggttcatcagctgtaccttggcgcattttttcgtgagtttgtgcgtcttgagccagattgtgcaatgttatcggcagcgtggcttcggcgatcggctgtagttcgtttggctggggattctgtatctgttcggtgtctggtatagtatctagactcctagaaatcctgaaatgttccatccagatatccaactaatccaactaatccaacaaaaatctgtcggtatcagtttccttttccacaccaatgttcagcatttgttaaaatgccgggaagtaagacatgtatttaagttcacctgttgtgcttgtgctagcctagcagcatgctactacagtagtacctacgtccactcggtttgaggtttactttttccgaataaactgccacaattgtgcttttgtatgaaccatatttcggagccgttggcgctactgtatttgccgtttggcagcgattgaggcgcgccgacaagaagcgcatcaatcactaccacttacttcatcgccgcgagaattcgcccgcaaattcggcgactttgccaaacgaacctccccgatcgaagcagactcgttcgttccaacactgcgcccgccttttcgccgtcatcttcggacccacaacacgatctgcctccacttgagcaagtcgagtaccacccgatctccgaattcagcgccgaaccgcaccgcatcacagccatgaagttcagcaccttcctcgttgccgctcttgccgtcgttggtgtcgtcgccgccgccgcccaacctgctgctgccggcaatctgccggccgtcaaatccgccgccgaagcgctccagaagcttgaagcgtccgagttgcccgatggtgtcacgctcatgggcaccagtgagaagatcgacccgcctgcgggtgccgccgccgcgatcgccgccaaggaagctgacaacaagcacgatggtgacgccgacaagaaggagcagtacggcggctggggtctgggtcttggcgctggctggggtctcggcggcggctggggcaactggggtggctggggtggctacggaccctaccgcttcgggttcatgtgcggcggcgtccctggctgggcctaccccatgggctactggaacatgttcggcgcgggtctctacggcggcagctgcggtctcggcatgcctttcggcggtctctactactgctaaattggccgaccgcgcagctacctacctacctacctaccttcttacctctctggcgtcttgcaccaattaattaaggttcatcagctgtaccttggcgcattttttcgtgagtttgtgcgtcttgagccagattgtgcaatgttatcggaagcgtggcttcggcgatcggctgtagttcgtttggctggggattctgtatctgttcggtgtctggtatagtatctagactcctagaaatcctgaaatgttccatccagatatccaactaatccaactaatccaacaaaaatctgtcggtatcagtttccttttccacaccaatgttcagcatttgttaaaatgccgggaagtaagacatgtatttaagttcacctgttgtgcttgtgctagcctagcagcatgctactacagtagtacctacgtccactcggtttgaggtttactttttccgaataaactgccacaattgtgcttttgtatgaaccatatttcggagccgttggcgctactgtatttgccgtttggcagcgattgaggcgcgccgacaagaagcgcatcaatcactaccacttacttcatcgccgcgagaattcgcccgcaaattcggcgactttgccaaacgaacctccccgatcgaagcagactcgttcgttccaacactgcgcccgccttttcgccgtcatcttcggacccacaacacgatctgcctccacttgagcaagtcgagtaccacccgatctccgaattcagcgccgaaccgcaccgcatcacagccatgaagttcagcaccttcctcgttgccgctcttgccgtcgttggtgtcgtcgccgccgccgcccaacctgctgctgccggcaatctgccggccgtcaaatccgccgccgaagcgctccagaagcttgaagcgtccgagttgcccgatggtgtcacgctcacgggcaccagtgagaagatcgacccgcctgcgggtgccgccgccgcgatcgccgccaaggaagctgacaacaagcacgatggtgacgccgacaagaaggagcagtacggcggctggggtctgggtcttggcgctggctggggtctcggcggcggctggggcaactggggtggctggggtggctacggaccctaccgcttcgggttcatgtgcggcggcgtccctggctgggcctaccccatgggctactggaacatgttcggcgcgggtctctacggcggcagctgcggtctcggcatgcctttcggcggtctctactactgctaaattggccgaccgcgcagccacctacctacctacctacctacctacctacctaccttcttacctctctggcgtcttgcaccaattaattaaggttcatcagctgtaccttggcgcattcgcctagaattcaaaaccaaaatataatgctttctcctttttgaagcggggttttcgtgagtttgtgcgtcttgagccagattgtgcaatgttatcggaagcgtggcttcggcgatcggctgtagttcgtttggctggggattctgtatctgttcggtgtctggtatagtatctagactcctagaaatcctgaaatgttccatccagatatccaactaatccaactaatccaacaaaaatctgtcggtatcagtttccttttccacaccaatgttcagcatttgttaaaatgccgggaagtaagacatgtatttaagttcacctgttgtgcttgtgctagcctagcagcatgctactacagtagtacctacgtccactcggtttgaggtttactttttccgaataaactgccacaattgtgcttttgtatgaaccatatttcggagccgttggcgctactgtatttgccgtttggcagtgattgaggcgcgccgacaagaagcgcatcaatcactaccacttacttcatcgccgcgagaattcgcccgcaaattcggcgactttgccaaacgaacctccccgatcgaagcagactcgttcgttccaacactgcgcccgccttttcgccgtcatcttcggacccacaacacgatctgcctccacttgagcaagtcgagtaccacccgatctccgaattcagcgccgaaccgcaccgcatcacagccatgaagttcagcaccttcctcgttgccgctcttgccgtcgttggtgtcgtcgccgccgccgcccaacctgctgctgccggcaatctgccggccgtcaaatccgccgccgaagcgctccagaagcttgaagcgtccgagttgcccgatggtgtcacgctcatgggcaccagtgagaagatcgacccgcctgcgggtgccgccgccgcgatcgccgccaaggaagctgacaacaagcacgatggtgacgccgacaagaaggagcagtacggcggctggggtctgggtcttggcgctggctggggtctcggcggcggctggggcaactggggtggctggggtggctacggaccctaccgcttcgggttcatgtgcggcggcgtccctggctgggcctaccccatgggctactggaacatgttcggcgcgggtctctacggcggcagctgcggtctcggcatgcctttcggcggtctctactactgctaaattggccgaccgcgcagccacctacctacctacctacctacctacctacctacctaccttcttacctctctggcgtcttgcaccaattaattaaggttcatcagctgtaccttggcgcattcgcctagaattcaaaaccaaaatataatgctttctcctttttgaagcggggttttcgtgagtttgtgcgtcttgagccagattgtgcaatgttatcggcagcgtggcttcggcgatcggctgtagttcgtttggctggggattctgtatctgttcggtgtctggtatagtatctagactcctagaaatcctgaaatgttccatccagatatccaactaatttaactaatccaacaaaaatctgtcggtatcagtttccttttccacaccaatgttcagcatttgttaaaatgccgggcagtaagacatgtatttaagttcacctgttgtgcttgtgctagcctagcagcatgctactacagtagtacctacgtccactcggtttgaggtttactttttccgaataaactgccacaattgtgcttttgtatgaaccatatttcggagccgttggcgctactgtatttgccgtttggcagcgattgaggcgcgccgacaagaagcgcatcaatcactaccacttacttcatcgccgcgagaattcgcccgcaaattcggcgactttgccaaacgaacctccccgatcgaagcagactcgttcgttccaacactgcgcccgccttttcgccgtcatcttcggacccacaacacgatctgcctccacttgagcaagtcgagtaccacccgatctccgaattcagcgccgaaccgcaccgcatcacagccatgaagttcagcaccttcctcgttgccgctcttgccgtcgttggtgtcgtcgccgccgccgcccaacctgctgctgccggcaatctgccggccgtcaaatccgccgccgaagcgctccagaagcttgaagcgtccgagttgcccgatggtgtcacgctcatgggcaccagtgagaagatcgacccgcctgcgggtgccgccgccgcgatcgccgccaaggaagctgacaacaagcacgatggtgacgccgacaagaaggagcagtacggcggctggggtctgggtcttggcgctggctggggtctcggcggcggctggggcaactggggtggctggggtggctacggaccctaccgcttcgggttcatgtgcggcggcgtccctggctgggcctaccccatgggctactggaacatgttcggcgcgggtctctacggcggcagctgcggtctcggcatgcctttcggcggtctctactactgctaaattggccgaccgcgcagccacctacctacctacctacctacctacctacctaccttcttacctctctggcgtcttgcaccaattaattaaggttcatcagctgtaccttggcgcattcgcctagaattcaaaaccaaaatataatgctttctcctttttgaagcgagtgtttcgtgattgttatttttttgcgtcctgcgccgaattataaaaacgtactgtagagaggagcgtcgggaactcgccatagtgcagtatgtcgattcggttgtaactggaaggtttcaatgtctgtcgtttgtcttgaattgatttcgagcgtacctagatatcctgggattatccatctaggtatctcaactccaattaatcccacaaaaaatcccacgaaaccggttcacttttcgacatcgatgcagctacggcgttcggcatccgggcaataacttcgtcgatatggtggggctgcgtacagtgaggtgaattgctcaacgtatcaaggtactccattcaacccaacaaatcagtattttttgcacgtgataccaatgaatcgtacaagtaaccaacatatttcgaagtatcaaaatcgatctcattaccgcaatttgttattttaataacattaaaatgccaaactcgtgctcttccatccgggtttggtcacattgtgggaccgatccagcgttgtcgtatttcttccaatacctgtcaccatttatatcgggaaatgatcgtttctgagctcccggaggtcattgtgtcgataatacactttgcggactggggggatagctgcaaacgtgaatattagagaactgtagtttctggagctatttcaaatttcggagctaaaatggcgtaatagactccgtggagttacaggggtacccgatagctccactggagttaagtattggagtatccgccggtattttatccgtaatatatttccggattatctgagttaatccggattttatgtagctccaagtccaaaatagctccagaaactacagttctctattaactcggttgtgttcctatccagctcatagaggcaacgtaagctccgagtgcgcttcgaaatgctggcacttcggtcttgacggcttggtggtgtcatcacgctgataaaggcgagctacgctttcaaaggcaacgctttcctaatgacaggcaggctctggcgatggtacttcttgaacagcaatgctaatgctgcttgatactgggtcagctcgaagtccgacaccacgatatcaaggtattccaccgtgcggttccgtctaagcatgtatagcagtgctatacaaaactcctggaatggcagtgtaccggtaccattagcgtcggtcccgatgtgaacacgtagacgcctcaccgaactagccaatgaggactggggcgcacagaaaaaacatgacgagactcccaacgaggctggcgcctgtgggtgcaacgttatctggttccgtaatctgctgtcacgaacttcaaatcgaatcttgaaagcaggcgtcgatatggcaatttctctcaaatgcgggcagttggcagcaattctctccagcatggatgtgcgaaagttcgaaacttggattgacaaatacaccagtgacgatccaatcagttccagaaatcggcacagaacgtcgtcatccggatcggtcttgagcacaagcatcagcgacgaaatgcctgtcgacagtgtaccatcgggtaaatcctcctcttgaacgaggttagatcggcgaatttggcacttcccaaacccaggtaccagcacatctacccatccattctcaattttatccgtcaggagcttgataccacgaatctttctggcaactgtgaaggccgcgtttttctcgagggtttcattcgggctcatgggtgtgtagtcgtatgcgtgtctttggcttgatgaaatagctattccgcgcctgctgcaggtgtggcaaacccagcaggtcttcttccggatagttcgacgtcataacctctcgcatcgcgtcaacatcttgtccagtaagaatcacatcttgaagagtaagtgtcttcaggcatgacaggcgctgcggatacttagaaaagaatccgtagcaaatccaccgccacctccacgtgacgacttctgtggcttgttcctcgctcaagaccattgaaatcgatacgtggttagtggtttggttcacggctgctccagagcacgcccgctcaaagaaccatgtcctaaaggggaggcaggatatgcttactgagtccaatctgaattgacggggagttgtcgacgggctggctcgcgggccagtcattacttgtcctccattcccttccgctgatccaccaaaaatactcgtgagtaatcttcctatacacctttgtgcggcctacttcgtaccaacgtgcaatcaaatccgaaagtcgcaaaattcatattgcaaatttctagttagcaacttcaattacgcattcaaagatagaattacggcaatcaaagttggaccaggggtccaagatctccatggctacgtaagctggcgtgctgtgctcacgccaaaacggaagacggagctgcgctcgcgccaaaagcaagggcgcgcggtttgccgcgcacttagccgacgccgaccgagtggagctcacttcgcaattcgccttcttcgcagatgtccctccaaggccgcgttactcgccacaccgtcctcgagaagcagcgtcctaaaatcccgcattaagcgagacttggctctggatcgccacgcaatctacgatcgctcgcgtgagccagacagcaacggtgagatcctctccatttcggaacgccagatccacatcctggagcgcgccgcgaccgctaacatgaacgtgatgaccccagcgctggtggccagcatggagctgcactgtcgtgacttcgtcaccaaggcgaacaacgaggacatagtgtacggcatgtagcagggctcgtcggaccagtagtagtagcctactttactatacgaatttgattgccgtaattctatctttgaatgcgtaattgaagttgctaactagaaatttgcaatatgaattttgcgactttcggatttgattgcacgttggtacgaagtaggccgcacaaaggtgtagatctccttgcggctgcatgcttcgcaggagctgctaacgtgtaaccaagctccgaccaaaaacgcatccccgagcagcaaataccatcgcaagctatggtctccactaacggtatcacgtccggcttacttaataccgatccgagttctactccaatcgattccaaaacaaacgtcactctcggaaggtcattcccccgccccatcgggggccacgtctggtctcggagatggcgaaccaccctcaacacattctgcgagtagttagccaaacctcccccactttccgcatgagttggacgcacttggatcgtgattgggacatcaatttcgtctggaacagctcctagctctcgtgtccccctccaaatctcgacgagctccttcaacgccgccttgtattctctgctacgccggtcatgttgctcggccccacagaagaacgccaagtcgccgtcaagtgcgtgttcggggcccgcatcctgcacaaagataccacgtagcatgctgccaacgtcgctcctaggaggccgtctgacgtacggtaactccagttgaaagcgagtgcgggatccgtcgaactcctcggcgacggcggatcctcgactatccacatcagcagtttcttccacgcgtcactgtccaccaaggccacgaccgagagcagcctcagcgcctctcgcagcttgaatctttggcttttgattccgaggagcacggattcttaggtcgaacggcgagtccgagctctcgcactcgcacaagcccacagcgcccctgatgtggtcgcaccacggcagcaggaagttccacatgtcgtccaccgcgtcgtctccttcaaaggaggcggtcgaccttccctccaaggcgcgcagctcgcccgcgagctcctccctcgccccctccatcttagatgcgttgataggtgactcaatcagaacacaagtcttgtactccttaacccccatcagattttcccgaggacaaatgaccaaaactttggcacaacgacacatgaatataccggtaacgtcttggcagacctctgtccttacacttgcccagcattacatgtatcgagtgtccttgtagacataatggccacctggaaagttgtccctttgatgaatttgtcaagctcaaattagtttatgtacgccacaccaccaatttggtccgtgtatttctggtatctttcaagagaagaaaacatgtcctggtgtaccatcgagtccgaccccggtacgcggcactcacttagtgcgctctcgctgagcctccgctccctcccactaacccctatatatctcttctgcaggcgtgttcaccgccctcatcgaggacatcggcgtcaagggcgtgcaggtggaggagctctacacgctggacgagcagcagttcgccgacctatcgcccgtgtacgggttggtcttcctcttcaagtacgagtccaaccatggggaagacgccgagccgcccgtgttcgccagcgaggaggacgggctgttcttcgccaagcaggtgatcagcaacgcctgcgccacgcaggccatcctgtccatcctgctcaactgccaggacatcgagctgggcgagacgctgagcgagttcaaggccttcacgggcgacttcccgtcggacctcaagggcctggccatctccaacagcgacaagatccggctggcgcacaactcgttcgcgcgcgccgagcccttcgtcgtggaggagcgcaaggacacggaggacgacgacgtctaccacttcgtggcgtacgtgccggtgaatggcaaggtgtacgaactggacggtctgcgcgaaggtccgatctgtctgggggaggtcccggacgcggcgaaccgcgactcgtggctgcaggtggcgtgtccggtgatccagaagaggatcgagaagtacgcggcgtcggagatccgcttcaatctgctcgcgctggtgcgcaatcgaatacagacgtacgaggagcagctccaggcgatcattgaggccggtgggagcgagcagcaggcggcccagatccaagcggatctggggttcgagcagcagaagcgggagaactgggcgctggagaacaagcgccgcaagcacaactacatcccgttcatcatccaactgctcaagacgctggccgagaagaagcagctggagccgctgatcaagcagcagctcgacgcccgaaacgctgctgccaacgccaatgcagcgaagcctacaagcgcacagtaaactgcatgcacgttaacgagagaagaagaagaaatgacagaagagattttcagtgcaaggcgtgtttatcagcagtgctggatgctgctcatactgggatctttcggggctagtggagacctcccgcgtgttactctaactgcgttcagatccaaacactcgcctcgacggctttcaaaacgctcgaaggtccgcggaaccttctcgtccgtctagaatccgccacgcagctgcagcaccatgtggatggtgccgcccgcagccacgttgtagtcctgcagcgtcttgtcatccgcactgcatgaataaacccaacacagcgataaatacgttagctacagctccgcttcattgccctgggggtgaagggcagacacgccgacgtacagctgcttgccgctgtagatgaggcggatctggtccacctggatgccctccttctcctgcagcgcctgcttcacgtgcaggatctaaaggcgcagcaccagaccaaagggggatacaggcgtcagcggagatatccgaccagcttgactcaacccagatccatctatctatcgtaccgtgttgtccggctcaaagttgaacgtctgtttccggcccgtgagcgtctacgccaacgaatcgagcagcaccagcaatgagttagtattagaggcacgatagagattgcgctgtccccctgctccgcggtgcgcgcgcgtaccttgatctggatctgcatggtgctagctagtgagtccgactcgagtgtttcgtgaaagtggcagtgagagtcttctttatcggctaagtaccgtagtggtcataagtataggaactttttactcatgaaaaatatgttgaaatgctgataagtaaacacaagaaagtggataagtgtgaattgctgagcacatgtttacaaaatatgataggttatgtcaagtactgtattgcttgttccacacgatatgtacataaatacttaaattggcttcgccgtcatctccacatttgcattcgtcttgaggaccgccgccatgttctcgctcttctgggggctgtggaactatttattctccaaggcggagctgcatctgctgatcgtggggctggacgacgcgggaaaaacggtaggtaagttgcggtgggtgcgcgtccggtcaatggggggaatcgtgggtctgatttttcccgtgggatacgattttttatttatgcgcagacgctgctggagcagcttaaaggcatcttcggcaagaagccaggcatcccgttggacaagatcccgcccactgtggggctcaacagtacgtgggctgaattggagacgtcacagatggtgaagggaggaattgacaggctcgtcgcgcagtcgctcgagttgatatcaagcggtccagggtcattttctgggatctcggaggacaggtgggtttgactgctagattggaagtaattcagctgccatggtagacttgaggctgatgaggatgtatgtgcacaggagcgtctgcgagctatctggaacaaatactacagcgagagccatggcatcgtgttcgtgatcgactcggccaatgaaggacggttccaggaagccaaggcgacattgcgtacgtactgtactgttgtaaacggcgggtggtgacagtgcggttgattgacttcgttggattaatttgtgttgcagacgctatgctgtcgaactcggagctgtcaggagtgccgttgctcgtgctggccaacaagatggacttggagaatgcgcggacggtgaaccacatttctggaatgctagatttagagagccaccaaggcgcagtggctagctacccgatctgtgcactgacaaggtgagtcgactctcatttgtgtcttcagtaagccttgcgcggctaactgtactgccgctcatacagggagggcattgaaggagcgatgaactggctggtggacgctgtaaagtcaagcgacagatattacgagaagactgccgctggcacaacgtgaccagattggtcttcgactgtgctgcttgcaggagcattccatcggcacagctaatagatgaagcgccgcacgcgtaccctcacaagcttcaaccagggaaacgggcgtgttcggtctaatcaaaacacaacgttcaccgctcgctcggtatcgtatcgtttgcctcgttcttccacagtctagcaatcacaaactcctggcccaagccactttgtctctatgcaacggcgcaatgaacaccctttccttcccttaaatccagcatcctgtctcgctaacatgctctcgaagcctacaggttgcgcgtgcgcgccagggtgctgagttccacgagcgagtggcccgttcggagagccatctcctcagccgtctcgtgcttggacagggcgtcgaacgtggccttgacgacggtgaaggggttgcgctggccgtgggtcttggacacgacgtccgtgatgccgaagcagtccagcacacaagccaccgtatcgctgaccgtgagtcccttgtccttgggcgccgggcgcaggaacagcgtcgagctgttccacttgccgcgcacttcgtggtacagcgtgcggtcgtcgaagcggtcgacgtacgtgaagcgcttcatggcgagcttggtgccgcgctggatggcaatgggcggcgacgagcccttgcccacggcatatccggcgacgccgcgcatgttgccgaccaccacgagcgcgcggaagttgacgatccgctcctgcgtcgtcaccttctgcacctggtccacgtgcacgatctggcgcagcaggcccatgcggccgaggttgagctcgccctcctcgtcctcgtcggcgaactccatctcgtcgccctccttgttcatggcgcgcatgtcgcgcaggatgccggcgtcgggggtcaggtactggccgggctggtccgggtccgcgagcgtgagcccgtccttcttgaactcgtccaagaggcggcggcgcaccttgccacggttctcgggcgccacggccatgaagcggctcttcttggcggcctcgggcatgatctggcggcgcggcagcgagtccttgcggtccttgtcgatgatcttgtcggcgccctcgtcgaagtcgtcgtccgagaggcgccagtcgtcctcggacgagaagcaggccacctgcagcttggcggcggtctggcggccctgctggcgcgccacggaggccgcgcccgagcggacggcgaagcgctgcagcatcctaaacacctagatgaagctgcgcacggcaaggagggttagtcgcgtcaacaggagcgacgccgacaggcgcatccatgagccttaccgggagaaaccccaacgaatgagtggccgaacctgcggctcccctgaggccaacgagtttgacgggatttgcaagtggcagcatcataacgacacaccaagaggtgtggcaccatcatatcgatacaccaggaggcgtggcgcgatcatatcgatacatccaaaagactgcgccatgcgtctgtccgcactgggcggttgatcgatcatggcgaccccaggcgacgccgagagcgcggcgtcctcggcgagatgcgcgcgggccgactgcatgtcgatgcgcgaggagctggtgctgctgcgcggcgacctgctggagctggagggcgagaacgagcagctggcggcgctgcaggcggacgcgagtgcgcgcgagctgcagacgcagaaggcagcgctgcagaaggacgaggagatcgtccgcctgaacgagacggtggcggggctcacggcgcagctgcaggaggcgctggacaaactgcagagcgacggcatcgagcagagcgctaaaacgtcgccggagaagcctaattccaggcctgtagagcaggaatttgaggcgctaaagacgcaaaatgaagctctggaggctaaactcaaggagctacaggcgcagctcgaaagagaggccactgccggcttgaaggcgcagcgacaagtagtgcaggtggcggaggagagcaaggacaagcgcagcgagctgtacacggcgctgaaggagaacgaggagctccgagatgaagcacaggagatgcaagaggcagtgaagaagatgacggagcaggccaaggagtaccaggcgtccatgcagacgatgcaggatcagctggacgcgtaccgagacgcggtggacgagcagactctggagatcacgcagctgcacgccaaggtggagcagctggagcaggagaaggtgagtgtggaggccaagttgatcgagatggacgagcgggagagcgacgtggacgcgctgatgaacgatgccaaagccaagtttgagatggagaaggccgtgctgcttgctgagctggatgagatgcggcgcaagttgaagcagcagcaaatgctgcatgaacaacagcaacagcaagtccaggacagtaagaaggcgctgcaagaggaagaagaggaagatacagttcgtggtggtgctagtgcgcccatggaagatctggagaagcagcttgaaatgctgcaagaattgcgcatccgggacaagagcaccattctggagctgaatcagcgcatcctccagcagcagagtgacctggaaagtcttgcagagcatttaaatgtcgacgcagtggtggagagcgctgttcagagcgcactgcagaagcagaaatcaaagctggaaggtttcgagcaagaaaacacaaccctgaagcggcgtctgaaggaacagcgtgagctcgtgcaggacttggagcttcgacagggtatcgttgagaagcagcttgttgaggcggaggaatggaatgccagatacgaacagcaggctgggttggaggacgttgtaaagtatcagaagaaattgcgtgcacagcttgagcagcagcagcaaatgaacatcaagctgcgtcaagaactcaatgagcaagtggacgcagctggtaagctgcatgtggcgttcgagcgcttgaaggccgaagtgggcaaacctgccacattcgagtacgatgatcttgcgattgcagatcacttaaagggtcagctagcgattaacgaagcagtcatgaagcagatggaaacccagattcatgagctggaggcggaaagactgcggtttctgcagaaactaagagaccaagcgcgcctcactggccacaagctctacgagcagcatgggctgactacagaacagtggagtgccgttgaagagtttattgatcgcgtaaaacacacacctgaggtggccaaacgtcttctgcagactgaatctgacgtcgtgagagcctgcgatgatatggagcagtcagcccgacgagcaaaggatctgcaggatgttatcgaggaactcgaacgaaaacttgacatcaggagcgaagaaaacgcgctactactgaaagacatcgaacaactccacaatgaattagagattgcgcagtcgaaaccgttgtctccagcggtaactctgcctgttaccagtccggacgatgtcagaggtgaactgctgcgggcccttgaatcggtcaaggcgaagtctcaacggcaagaaggagtaatctaccacctgcgagctgaaatcgcgtcgttgcgaaaggaacgcgagcaaaagagtagcaagaaggacgtgacgctgcctgataactcagcgaaaagcgtgggtggaactcctaatacagctgaagacaaacctgtggtcgagcttcacgcccaatcgtacgcggaaacccagacttctcctcgtgtggccaagaagaaaccatcagtccatattcaaacccaagtcgacgatgatgaagaagagagtgatgttatttcgctatcagcttcagaagatgaagatgaagcggttcctatcgttaagaagaacaaaaaggcccccgcagcacgaactgaacaactcgcaacagaaccaaagcaatcatcctcgcctgttagtccggattgcaaacctcgtgatgtgtggactgatcatgctgataatattgcgctggttgtcgcgaaagccatcgaagcgcagtttgccattcttcaagctcagaggggttcgttattgccttctacgacgccggatgctccagttaaaactatcgttcgagacgaaagttcttctccagctacggcatccaatgacagcaagactagtggcgatatcaaagtagctgccccggcaaactcagcgtctccacgctcgccactacctcgtgcgacggtcgataatatcgcttttgagagcgaggacgaaatggtccagcagattgactttctgcgggagttaaacttgtgcctagacgagttagtggcaacggaggcacgtaatgaagaacttcagcagcaactacgtcagcatgaagaggtattccagtctcttatggaccagcacacgattttgtaccagcatttcttccagatgcatacgcaatacgccaacgcggagatcaagctccgtaacgaactggaagagaaggcacaagaaaacaaggacttcaagatcaagtgccaacggtatgaagctggcttgcatctgctcggagttcaaaatgagcagagtggaacaatgtcaagtgacgcacttatcagtgggaacgaagcacaattgcgatcggaagtaattgagctgacccgaaagattgcagcttatgaagtgaacgaagcgcgactcaaacggaagtaccagcagcttcataacgaatggcgcagcagtacagatcacaacaaattgctacagcgcgagtggagtgagatggaaaagacgctgaagtatcgggttctgtacctggagacgtggaagcaaggggctgacgagatgattgaacgcatggagaaaacgcttgaaaagagtgttttgcgcgaatttgccgacaaacagcagcgtgcaatgaccggtgtcctgaagaagtacaacgcactcagtgagacctatgcagagatgcatgcgaggtatctagagatgtacgatttgccagcacagctgagccgaactcagcacagcctcatggtgttgcaagcggagaaaagtgcaagaagtggtgctgggagtagcgaaggcggcgatccagtagtccttcaggatcgtataggtcagctggaaaacgagttgcgcgtgcaaatcgatcgcgtgaaggagctcgaagagtcgaaagcaaatagcttgctcgtcagtgatgagatagttcaaacttcggtggttagcggaggctctggaggcgacaacgagctgcgcgatgagaacacgcttttgtacgagagaatcaacgaggtcgagcagctctatgaaagcctcgcgctggagtgtgctaagtataaggacattgcctcgctagcagcatctcaagcgaatgtgctgacgaagcgagctgctcaaaatcaaggcaatcgagagcagcaagaggaacagctgcgcgacttgatggcgtcctcggaagatcacgccattgtaggagaacttcaacaccagctgatgcagattaagacaacttaccagcagttcctggtgcagtacgacctagtaaccgaagcacagcagcagccactgttgaagaatcaacgacttgagctcgagatggagaaaaaagctcaagagttgtcggctattcgcgaaagaacaagtgatagagctcaagttctggagaacgcaatagcgcaagtgaaggagcgtgactggacggcgcggaacacgaaatgggaagctttccggaagcgcttggatgccctggaggatgaaatattagtcgagcagcagcgccgtaagcagctggagaaagatttggaggacaaacaagcacagctgcctttgcttgaattgaaacagcaacggggtaaccaaagtgaagttgggcgtctgaaaagccgtgtagacgcccttgaaactcgagaacgattgctcatggggcagcttgaagctgcgatgaaggcgacagggtccaaagagaaggaaatccggctgcagacagagctgagtgagacaaagacactgaatgaagacctcatgcgtcaagtagagactgttcaagctcgcgtctcggaattgctacggctaaatggtgagctggaatctgagaaacgtgagcttcgttgcaagtacgaagatctggagctggacttgcagtacgctcggtccgggctcacaggcggagaaaagagagtgtccgataaccagcgagaatcggagcgcggaagccattccccgttgatgcggcagaaggtcggattgtatgaaaaggatcaggcggagttgcagcaggccgctcaggcgactatcgcaagcctaaagcaactcgtcgaggagaagaatacgctgatcaacgaatatcagcgaaagcttgcagttgtacgagcgtcgagtgcccaggacaaggcgcaggatcgactggaaactacccaactgaacaaaaagctctatgaagagaaccaacgcatgattggacagctgaaggaggccatgagtactatcagcagtatggagagatcgggcaagagtaagcaggctctgcaagctgcacaagagcggcatgatcatgtgctgcaggagtggaagcaagccgaggtggcattggagggtgctaagcagtctattcgcgagcttcagatggagcgagaagtgctgcggaacgagagggacctcgctgaggctcgtgcgggcgaggcgctggaagagatcgtgctgctgaaagaaaaggtcgtagagtgcgagaagcacagccagaagttggagcaccagctcactttcgtcaagcgcgatatcgcgaagaaggaggagaaactgaagctgttgcgtgacgcaatcattaagctgaaggaagagttcctcaaggctgaagatcgccacgcaatcgagattgccaaggctcagcatgcgatgaatcaagatttcagtgcccggaagcggaaagagaaggagcggcgcgaggaggaagaagacgagtggcgtgaggagaagacgcgactgcagagccaggtgcaagtgcttcaggaaaagctggctttactgaagaaaaagcatgaccagcagcagcgccgcaagaagaaactagaaaacgaggagaaggaagagaaagagagtacttccgaggctgatctccacattttgaaggaggaagtcgagcgtttgaagcgtctgctgaaggacaaggtggtgagtgaagcgcgagctgtggaagagctggagaagaagatcaagcttctgcaggcccagaatcttgcgttgcgcgaggcagccactcacgcagcaccggcgccaccaactacagctgatgagaagagcacacgcgagaaactggacggggaacggaagcttcagcgtcgtgtggacattctgatgctgcgcctcaaagagaagcaggcggatgtgaccagtaaagacagcgagctcgagcgttgcaacgagcggatatcgaagatggagtcggagttgcagtcgcagcaggcgagattcgagaaggagcgtttaacgcaggcaagtgctgtgcctactgttgcagctatgccaatcaagcaacaactcgaggagctagagcgtcaaaacgccttccttcaggagacactggcgctgaaacgcaaggaatgggaggagtctttcacaacgcagatggagaagtacgaggctcagttgcagcgccttcgtcggcgacttgtacagcacggaatatcctcacacgacgatgacagtaatgatgacgacaccggagacacaaaaggacaagggcctaactcgcggctgcaacgcgaagagcagcgtttcctcgttgggcaggaagttcgagaggagctccttgctcttggtgacgagttgcgtagtaaggaacaggaaatggtggtgaaagacacgaagctgctcgagcttgagctggaggtcgaaagtctgcgtcttgaatacaagcggcttcagcggaagaatcaacacagtggtgggtctacgggtaacgacgacacgccgaaacagcgtcgtgctgcaaagggtggccgggggtcttcatgggcgacacaagagcgcctggagctcgaggaggtgatcgagaacatgaagaaagtgatcgaaaagttgcgtgcagagaacgaaaagctcaagaaggcagcggcaaagcaggctcttgtgtctcccgagcgagtggatgcaatgcgacgcaagctgaaagagcagaaggaagcacgagagcggctcgaggctcagctggagaagttgcagcatgaaaacggtgagctgaaggacaagctgaagctgcagcaaaagcttcgtgccaaaaccgcttcatcgagctctaccaagaacgaaagcaacgccctcgagcttcaggttcaagagaaggatcggcaattgctcaagggtgagcaagagctcgccgaactgcggcatcaggtgctgcaacttgagctgcagcttgaacgtagcgccaatgacgccaacgatgaagaggatgagcagatcaagcatgagcaagaagaacgcatcaaagacctgcaagcccaagtgcttgaactggaagacgaaaacacgaagctaaccaatgaattagcggcgtttgacgaagacttcttcgaggaaatcgaagacctcaagtacaaatacgcgcaggctgtacgcgataagcgccagctggagaaactccttgctggaggcgcgtcgcccgcgtccacgtcttcacgccgcagtaagagaagctaggggttgaatctagtagtcatcgccgcgagacacaacttccttgcacgtggggcgcaggatgatggtgtgctcgtactgtgcggtgtagctgcccttcacatcaacaagaggcgggtacgccgtgacgatacccgtgtccaccaggttcttgagagccatcaggtacttctcctgcttggcgcccttagggttaatggtggccgagccaccgtcctcgcgctcgatccatcggcggcaccacggcagcgtgccgaacgtgcgcgtgatgtggccgagcagcttcttggcgcgcggcagacgcagcggcacgtgcggagcgtcgaacgccttggcatagtgcgagcactcgccgtcctcgaccacgtaaccgcgaccggtggtgttgaacgtctcgatggcgaagatttcaccctcctccatcttggtctggtcctccgtcttgacgatggggacgctcttgccggcgtggatctggtaggggccaatggagtggccgttcaggttgcggatggacttgacggggtacgtcttgccgtcaatagtcacctcgaacgactccataacctcctggatctcgccaccgatttcacccagacgggcatcaatacccgcgcaggcaataccagcgttggtcgcagccttggcggcctcgagcagcgggtcgaactgggggtcgaacgcaacggtccaggcactgtcgatgatgcgtccgttgatctgcgtaccgaagtccaccttcatcacgtcgccgtacgacagcaccgtgtcgtcgcccgagttgggcgtgtagtgcgccgcgacgtggttcagcgagcagcccgtcgggaaaccaatgccgcgctgcaacacagaaacacaataaaataacagtgtcaatgcacagcaatgacaagggggaaatagatgactctcaacgtaccgcaaagccggcctcgaccacgagctcgcggttcttgttctcgagctgcgtgcacatgtcgatgagcttgacgccgggcttcatgatactctgcgcgaacttgcgcacgtggcggtgcacctcggcggcgtggcgcaccgtctcgtacaggtcctcctgggcgcggtccagcgcgcgcttctcctcgctcgtggtgcggaacgtgttcaagtcgcccgggtgctcctggatctcgcccacggggaagtggccgtccgggaagagtttctcgatggggatcgtgggcggctccgtctggcccacgcccacgtagctgtccgtgaagcccgagacgccgcggaacggcgccggcttggagcccgcgccaccggcggcggccttgctcttcttctttttgttcttcttcttcttcttgttcttgctgctgccgctggcgccgccctcgccctcgttggccgcgacttcgccgctgtgctcggcgtccgacatcttgacgtcctcctccacttcagcgggggccgcttgggccgcttcctgctcttccagcttcgccatcgtcttggtctcgacttgcgccttggacggactcttggatagtgagttggtgatggatgaaagcttgtgcacgaacgactggttacggtttatccagcgtaacctgtagtaaccggggtacacgcgtgtttttattccctccgatttgaggtcctaacgttacgtaggacctcaaatctacgtaggagtcctacgtaagacctcataaaagttagtaccaaggccagtaaaacgagagctatgcatagactgggatagctaaagaacttagtgtgagcatcttgcgccgtcactatcgctatcgccaaagcagcaattcaacgagaaacaaagtcgcgcgcgttgcacgaagaagctctgaaatctacgacttattaatacctgttacctacagtatctgtggtatgtaaatttgcgtttccgttacaacacagctcctgctatgttgacttagagcctatcaggatttccttcaaaaaaaatctttgagcttttcgcccgtcgaccattatcatcttttgcggacgcaaactttggtttctttattcctttacctcagcaacgttgtgctaaatgcacttggggttttaaagagatgacggatcgtttgggccgtacttggtgcgtgtgttcggctaggtgcagcactgaaaacacgcgttgtacttccttacatctcgagcttgtgagatgaagagcataggcgataaccagttagcttcagttaccgggggccagttttccggctcagtattaccggcttcagctaccgaggtgccgcctaatttatcccagaacaaaaactgaatagaaattgagcgaattccttgcaaaggtaggccgacaagtgagcgcgttcagaaccgctatacctgtagcgcatatacgtagctccacgctgagcacggtgacctggttgcggtctccgcctgtacgagtgcggccaaactatgcatttgccacagatgctttcaggcgctctggcctgatctagtccttatttccaaaaaggtattaataccctttagatgaagacggagctcctattacataggaatccgatgcaagcccaacagcaaatcctaggtctagccctaccctctcttcttaagaccaaggcacaatagccaagttttagctagtcgtacagactaacgttagttgaagcgacccttcctgcacaagctgaagttgaagtctgtgttggtatcgtacttgtatctaggctggtcgtatagtacactaggctacaggcgtgatccagttcagtgtgtgcttctcatcgctcgctgcataccaagtgcacgacaacgcgtgtgttgttgttccgtgcactgggtccaagtgccagtggaggatcagcacgttgaatgtccgtaggagctgtcgcggcagtaagcgcgctgccaccagtagaagcacagaggaggcttggtagatattcgcgccatagaagacgtaacccgtcagcagcagagcctccacggttgagcagtgcttcccgttgtaagtcacgtaggcgatgtcatcgcaatcgtagaatagttttatgaagggcataccgaggcaattcagctcgaaggagtgagcttggtctcagagctcgtacttatttgctgctggccgtaaggaacgcaccgattgacttttgtttcggcaaacaacgactctccggctcggatcagccacgaagaaactcccaattgagccgcgagacgagagcacgactttcttgatcttggcgctcatcttctttttcaaccagcgaagttgtcactgctagaagacccagaatgaccgagagaatagtgattatcgtcggagtgttcacagtaaaaatgatgcaggcatcgttgaggccgcagtgattcgccccaagtgctgacgtcttccataaaatctgtgcattttgggaaatgatagaaatcaatggtgtccgctgcaccactcgccgagtagtcacggtacaggccgtgatgacgacttgagtggcctcccaaatcagtcgaaagtgtcgatccagctgctgatctcccgaccgtgactttgccaagttgatgaatgagtacgagaaggcgtaaaagcagcacgtgagattcgcgagtgattcggtcgtcaatgttccgtggaaaatccgggcaagtacaagtccgagttgtagatgagatggtagaaaatttgggcgaggtacaccacctgagtagcgccgttctgatttgagtgagcagcaccgacctcttgggcgacatcacttcgtacagactaactacccccatgatgaaaatctgcatcacgaccaggccaggtagcacactgataccaactttgtcagcataacgactccgaaacgtgttcatgcacatggtgacgcggtttggtgcggtgatctcacttctccattcccactgcgagttgtggtagttgtcgatgcacacgtcacgcatagcggtatatcgtcgggggattggaccattagaccataagaaccccagtggttcgagatctcgcaagtatcttcaatgtacacgcctgtagcattcacctcgtgcactcgacaggctccgtagtacgcgtgtagcagaggctccaggacggtgtcaactttgtacttcgtctcctcgccggctttgaccacacgcgagatcggagtcatagtacggaaacaaagtgagcgcctcgggaacgtccgccagcaagtcccagccatccatagcaagagccagcttcgaaccgagaagactctcatccgtggggacgtctgggcgacattcagtcacatcgtgggcgattatgatggccacagcggggattttgccaaactcggtgctgtttgaagtgatcgggaataaaaacagtcgagaaatcgctatgatactccatgtagtgacgcagtccttagctcgttcaatgcccagttcaagttctctctttgtctgctgcgggatactgagattgagagtggtgacgtgtccagcactggctgaggcgtcccggtcaagctgttcatcactcgtttacgccactcaggcataaggcgtcgctggcgtccaaagatgctgctagtgcgagggcttcaggacttagagagctgaagttgtatagcgattttcatgttgggggcgtaccagtgaacgctgtgaacggaggtgcactcgtgagagccactctgttgtacatcgcatacgtcaataacacgatcttgcatgtacccagacaatctgtacagccgccgccagccatggacaaatctttctcggtgaaagcgaagatgctgttgtcggacgtgatgaggaacgtggcgtcgggcgagaggtagttagtggcggcgaacagcaacagcagcacaatcgggcctacaatgatgcgcctggaaactgctagataagcgcccaagacagacgggtgtagcagacttctccacccgtgactcttcctacggagcctctcgtgttcgcagtaactcgtcatccaattctccgagccatcatggtacagttcaggcgtagacgctcctctccgcgatttgcaaagacttgaggctatatccgggattgagctcatcgacttttaagttcgtcggcgctagtttacgagtgagtgaacagcgatttgccatccagcactttctaaccagaaacgtcttctaacggacaaagtgaggtgagaagcgcacaggccctcaatcatgcgcttgatcgtttcaacggctgcacgtcttgaacaaaccaaaccgacagaagtgcaaacgggtcgtccttattttcgagtacatttcgctgactttcgagtaataagtaatataaggggattggtcagattagtagagcaaactgaattattgactttgaaaagtattttcttgaaaactaccaatctgttggagataaaacctgtacacaatgaaagccctagatttgctctaacatgtgcaccaatccagacacagttagcagctatgaaagtgctattgtagcgcgccaaagaaagcatacctgcagtatgctgcgatcagtttagtagagcggaatgatactggtctttgtatcgaagtaccatatggaaacgcgtggtaagatttttatagctaatcaaagcacgtatttcattatttcagcaatattactggttctactaaactggtcaattctactaaactggccaaaacccttactcgtactttcgagtacatatattgtgccttgcatgctttctgtataaacaacgacgtaattcgttgttttagcaaatcacggtgattagcccatcattgagttaggaggctaactcgtcgatttaagatagaataagggtaactgaaccatttttcggccgcttcctaattccggccacgttaaccacacaaatcctggttcatacagaaatcagggaacacaaagctgcattgctagattgaggattagacctgtggggctggcgtgaatgcaaaattatatctagagctagctctgcatcgaagtttgggtagcgtcggacaagaatcgaggtcgatagcgcgagctgaagtggctccatagtaaagtgcacgggataagttgaccaggagcatgcacttggagcacatatgcaaatcgtatgttttctcaatactaaacttaagtcaagcccgatggtatcatggaggcgactgaaatagttggctacagctcagcaccaaaagcattgttttgatatccaaagctttgtatagatttgcaagacgtcactcgtggttgtagtcctgcccgttatttccctaagaatgtttattcgccgaaattagttgccaaagttcgcttttgcggattatgggtcatctgattcagtttgatttgctctttgtatcgacaggtggccgaaaaaagggaggcgattgaaaataatctcaatcgaagcataatgttcgctcgtcgatcttatcacatgcctcgctccacataagctataagttgtacacgaggtagaggagattctactctttataatggcggctttcaagccgaaattgacgcagccgttagaaaaaaacttatattaaaattaggtggccgaaaaccggtcgcattacccttagctgctaagacaacgagttaacgttgagttatgctcactttcgttgaatggctggagtaaatccgtcaatactacggccctgacattctaattctaactcgctcgctttgtcggattgctttttagtcgatgattgacatgcgttggcgatctatcgtactaaactacgtctacaatattgaagaacatccctgtttttatatcgaggagctgcaagcagctttaaagtcagcgtttcctgcactatcaaacatttctagtagaaattttctactgctactatatgccgtgctctgaaattcgagcttggtttaacgcgcaaggccacgacgaagagagcgaaagaaaacgtcccgccgaaatcggtgcttactattatgcaaggagttggcgccattttaacggggaccttatcagtttgttttcttgcagcgacaaccgattttttcttgcagtggcaaccgctccgttcttggtactggcggttgatttgcttaacttagagttaggctgcgagatatgatcaccgggaaggatttgctcgttggtttagagcccttaatcgcatgccaaagttcgtgcaaagcacaatacctcttttgaactcgtgcgttgcgttagcttccagctactgactccgctctaagaacgttgaatgtcagtatggcattcacgaacgtaaataacgtgatactagccctttagggcaacttgcctgatgttttctgctggataacgcttaaattctcaattagcttccttacatccgcataagtggttcgatgcgttacttctccagatacattcatgctgtgtcttccttcggtatcatccagggtggcaatgccggtcgtggcgcctttcctaagccacgaataaggtttatgtgaaattactcggaagtcagtgaagtgtactcgcaataaagtagcacccagtgcaaacgattggtttgaagttatatttcacgacctttgaaccaaattcaagcgtttcgggacctgcatatcttaggtttggagttactgaggtttggagttatgcttcgctgcaaccgatgtttgactttctcgccacctcgttggttaatatagcaatcaatgcttcagacggcctctcggtatgagccgcaatccaaatgagtttttatacttttatcatgactctactacgcacagagaagctattcctccatcgcgaacatctttcggccgaaagaatacaaaaatgcagtttctgccgccttgctcgttgtaggcatacaacagccacaattgggagtctacagtgctgagtatgtggtcagccttacacagggttaaatatcaaagcgtgaccgtgtgttggtcgttgacgttgaagatgctgattgtgggcacaactacaactgccaatcgctcacacctcaacatcgtacatgggtagttaccgaggggccgaaggcgaggcggaaggtggtttttcctggagggggaaggtcatcaggtcaagtgctcgagcttcaacatcaagactgcgaagccgccgttcagcacaagctcgtcctcgccaaggcaccatttaggtgccttggtttcctatccaacatgcggagctgcaaggtgcagtttccgaacctatagattttcccaacgctagttaggatagagaggaatgtcatccattcacggagagggcatttgctcttttgcagcagcgcggccatcacgctccaccgacggactcactcggcttcatcacgccgcggtcgagctcgctttcctacacctacttgggggatgctcgctctcccccgacggaatcgccgacagagcgagcaaaagagcaaatccgtgctgtggtttgtgacttcggctacccgagtgcaattcggccgtcgagatttcagctccgaccccagggttcagttcgactgggagcaacgcggttggtgaccccgggagcacagcgtccgccggcagacccgctcaccttctacaaggttcatacacatggcccgaacgagcttaatctcgagtaaaattggcgataccaagagtaacacaccaaaaagaggcactacgagtaatcccaaacaactaaagccgagatacgagtattcagaaattgggtacgattgaagtattgttaacaacgaagaactgtgaataaaatgtaacgaaacgtgtattgttgtctacgaaaatggatcgtaggactcgatatgcaaaatgaaaaaaatgctagctacaacctagcacgttcgagttgttctcgccagccattgatcgccttaataggccacggctccagcaacatctgcaccatgggtgtaggccctggtaagacactcggctaactcttggcactccagcttgacttgtgcaccgttggaaaacttcgtcatccagaagaagacgtcgttggtctccccccacgagatcccctttcccaacagaaactgctccacctcactaccggagtcatcgggaattttggattccttcatgaggttccaatgtaggggtctggcagggtacttaagaactctcgaatcagcacgtcgacggagaatcggtgagtgttgtctccgccttctgtgagcggacccacgcgcttgcgctacccaccacttagctttctcgttggcaacgcctttagcatcccttgaatgctgatctccttctgcaatgtcatggcagcgacgacatgggagcattgccaccctgtttgataaaacagggcgcagtcgcacacgtacttcttccgaatcgcctgaatctaaaaccgcagtgacagtgtcagattcaaatcgcctaagtgtgctactaccacatatcaaactgaacgtactgtttgggaggggattgatggtgcagccgttatcattccaccatcgagcagtggatctctgcgcagtaatcgaacttggtgaatgaacaagcagtgcaattccaccaggtttacagtcatccctggcggtagtttgccgttgatggagttcctgtagctgccaaaatgaaacaaataaatagtgagcttaacaactttgactcgcacagctgtaatactcacattgtggcacggtcgcggttcaaaacagcactgtgaatgttcttgggcgataccacgaacttggaagcgttaaacaagaacgccttcacaaacttcgcccgtgtccttgatcatgtagtgattagacttctcttggacaagcgtttgcgcgcgcgctactacaccactcatgaacggacctagaatgcacgagatacacgaataataaaatcaatcggtacacaccattagcaaatgataaacaaacgtcatcttaccttccgagaagtgatttagagcagggcgagccggctcgctttcttggagaccaagaatacgaggaattgagtcgttcaagacgaccgatgtacttgcccgaagcgtcccgacacacaccttcttgatcacgcggtgatgagcctcaagggcattctgggacggtgtaatgcctgcggcggcggcgacgtagaaccagttcccccacgtgtcacccaagtaaatgtcctcgaaccacttggcgtagtctcgctcgttttgttggatccaaaactcgagaaagagtttactgagcgccttgaactgcttggccgagcgagctttactgagatagcgaatgtccggtagcacgttgtcttcgtagaacgcagggtccttgagtagcttgatcttctctcgacttttccgcacgaggtgcgggtagcaattaaggagaattacatcaggccaaacctccttaaaagcgttcgcaatgccttgggtcctatcgaggctgccataggcaagggctaaatcgactccgaaaaacagtcgggtaaagtgcttggcagtccgaaaaagcgttgcgtacgccgtctgatgctctgtcttgacaaacatatacatccaagggacaaatgttttggagtactgttttcgcgaatagtgcgtcgtgtaggtctcaaagtctacgagggtccatccacctacaaaaaaagagaaaacggtcagctaatgcaccttgccacgactagtaacacacctcgaagcttaccgaaatgcagtttatatgttccatccgtagcacccaagacgccaatatcctgctggcattcgtaggccttgggaatgctcaggagcatgtgacgcgaagtcaatatgagcccgaaagactttactgccttgccatcctggtcaatgaagtcgtgttcaaagcactcaagaacgatcacaccgtgctgaaactggcgggacttgttggcaaactgcgttgcggcgtccgcagcgctgatgtcgtcttcgtgaccaaagaagtcactcttcgatgtacacaaatgtgtgtacgcccactctagtagagtcgtggcagaatcaaatgcaagacaaccacaattgttcagaattattactatcaacccaaaataaagtacagagctgccaaaaacatcatacctgactgtttcttccggagtccagcttttcggttcttgagctgactttccgtgggtaaatgctgaagcatgactgggttgtctccgtgacgatctagcagcagcttccggcacttctttggtccagcgccgccgaacaggatgctgtcgatctctcgcttcagcgcaccgtgaattccacggcgctgaatatcttgatcttcgtctccatgcatgtctgtctcctccaaaacaaactgagctccgctttcgtccgggcttcgccttccaccttagacagccgcagccgtttggggcaattaacatgggacatgcagcagtagatacgagtaccgttgccagcattgccgtagttgtgtttgtacttgtagtggaacccgtctaagacgtcgatgccaatctgcgcctcttcaagggttgggaacaccttgcacacaacgaacgctctacgagtcgctctgacttgctgcccctcttcgtccgaagacgaggcaaagtcgctgccgcttgcctcgtcggctctgctcatgttgagcgaaaactgactctgatcgtctcggttcggcctgtcactcgtaacatatccggttttgtaaaatcttactctagatctcacctgttttgactttacgcgtacccccgccgtgatttactccaggataagccgcaaccgtatcgtgacaatcgtcggcgtgttgaccgtgaaaataatacaggcatcgttgagcccacattatttctctccgagcgtcgacgttttgcgcagaatttgagcgttcgtcgagatgatcgactcgaggggattgcgttgcaccacacgcagcgccgccaccacacacccagtaatgataacctgcatggtctcccagatcaatcggaaatggcggtcaagacgttgatcccctgaacgcgcctttgccaaattgacgaacgagtacgagaaggcgaagaaacagcttgtgaggttcgcaatcgactcggtcgttagcgtgcccgtcgcgaacccgatcaagtacaggtccgagttcagaaggaggtggtaaccgatctgcgcgaggtagagcacctgcatcctgccgttctgacagcgataggcccagatctgcgtgagcagcaccgactttttgtgcggcatcacctggtacagaatcaggttccccatgacgaagatctgcaggacgaccaggccgggaaggatactaatcccgactttgtcggcgaatcgacggcggaatgtgttgacgtacatgacgacgccgttgtgctttgccgccgtgatctcgctcacccactcccattgcgagttgtacgagttgtggacgcagacgtcgtctgtactgcacagcgggatgtcgtcgggagtctggaccatcaagccgtagatttcccagtgccgcgaagtctcgcagtccgcctcgatgtagacaccagtagtattcacctcccggacgcggcaacctccgtaatatgcctgctgtagaggctccagaacggtgcttgactctaatttcgtctccacagcttcgattacatgcgaaaccgggctcatgctgctcttgaagttgtacggaaacaacgttagagcctcaggaacgacttccagcaagtctcgaccgcccgtcgctagcgccagcttcgaacaaccgtctgcagacgtgtctggccgacactcggtgtagtcggggaagatgttgatcgctacggccgatattttcccgaactcgatactgcgtgggggtcctgtaagggagaactgtcgcgggattgccattatagtccacgtggtcgcacattcctcaacacgagcgatgcctagctcaagctctttcttcgactgcggaggaatgttgagattcatgagtgtaacgacgtccatcacgagctgcggtgcagcagtaacgacgctgatggcggacccccagtcgttgactccgctctcgcagatcgcgccccccgcgtctaaggcctctgctagggcgaggagttcagggctcaaagagctgaagtcatacagcgactccgtcggaggctggcctgcaaatgctgcaaacactggcgcgctggtgagcgccttcctttcgaacaggccgtacttgagcagaacgattttgcacggccccctgcagtcggtgcacccgccaaccatggacagatcgcgctcggtgaacgcgaggaagttgttgtcgaatgtgatgaggaacgttgcgtctgccgatagatatttcgtcaagataaacagcaacagcagcgccaccggtcctacgatggtgcgccccacgcttgccaagctcgcaccaaagacggaagggcggaggaaacttcgccatccgcgagctttacgctggagtcgctgctgttcgtggtagttggtcgcccagtttgtcgaagcgtctcgctcctcgagaacagcgtcacgaacttttgtggacgaacggcacgcccttgagcgagttgcacgagccgcgtcgtgtgagaactcggagcaggaagagccagtacgcatcaccaactttgttgcttgctgagcaaattttagacgtctgcagttctaataattgctactaacaatacacttgcgcgatgatcatgcatatcccaaagtaatactctctccacatcgaacgtgtatgaacgccgtattatttattaagatactcacctatccgcattatgagagtttgctcaacagctcgtcgacagctttgagctcatctcttagcgacatcaagcggtccgttgtgtcttctgccctactctgcaccccaccgaaatttagcacgagctgtgcgcttgcagactggatgtccaggcaaagttgcctgcgtcgctcttgcaactcctcaacactcaaaccttccagttccggaaattctaccgtttggtcttgtgcatcgggcgtagaatcggtaggcgctgcttccaacaccggcatcgcaactttttcggggcgatcaatgtcctgtaccggaaacagctctcttgcaaggggttgctgcaccggcgattgcgtgacagtattatgcttgggcgcgttcagctcgcgacggaatcgttcgaaagctcgcacgaaagaggcatcattcaactcggcgctggtaacgctagatccaccgaggaaactcaggacgctctcctcctcctctttctcttcctcctcgtcttcgtcgattgacaggccatcgaaattaaacttgcgagcgagcaccggggtggagtacgcgtcatcaccgaagcgaacctgctttgacgatgaagcagtggacttctggttacttccagtggtcggggtggtcacgctactgccagtcgtgggcgttctgtggttctcatctggccgctcgtccgtagatctgctcgggcttgattacagtttgaggatttcatgggaagcgcttcggatggttagctttttatggtcttcttctgagtcagaatttctgtcatgacaaggcgcttggtctgaagattgtgggagtgatgacccacttttctgctggatctgagccttaaggcgcctgatgtttgccggaatctggataaacacacgatctaccgcgcgcattggcctcatctcaccggccacccacttgcacaacctcgtgaggtttggaaactccgagcatgcagcagccaagctcgcggtcagctctgctcacgctgtcatgttacatcgttgttgcgtcgcctatccttttgtttatggacgatttgctgtgtattgggggtgtcatgtcagaatacggacatgaaaaaaatcttccgcttcggatggtatgcatgtctacatgtacgaagtatgcttcaacacgtgtccgttggcaccacacggtggtattaataccgtaagtttcgcaagctttgaatacggtgcatcagaacgggatttgagccacttgtttcggacggtttagaaggtgtgtgcctaccggtactggaattttgcatttacaaccttaataggaacataaaaaatcccagaaggttgctggagcaaccttatatttctgttaaagttgcttgagcaaccttgtaatttacgacacatttcctctactgagtagcttaccgcaaaatttctagttgggataatatattcgtactgtaaaattgtcaaggttgtccaacgcggccggaagctcgtgcgaaaggtgcttcattctgaaagatccaacgtggaaggcaagccgaagaagcaacagaaagcgccatgttactcctgctcgatgacgtgtaagtaagtgtgtttgccatggcttcggggtgcgagtacatctaacctgtgcctctggacaatcagtagccacggccaacagccaagcactggagggatgtggacgacagccagtgactggatggctggaagacgctgcgagggctgtgcgtggatgcccacgccaaagaatgtgcgtggagggctgcggcgaagactgtgacagcgaagcacgcctggaggtatcttatggtacgttgcactgtgcggagaaagttgttaagatacttgcgtttgtactccaacgcgtgatgcctgtgcacgttcgagcagacatgaagaacaaggttgcggtccggcgaatcgagatcacagccaaacctaaatgggaagaggcgaaagctaagcagcgtagggcgtaatatatggtgtggatatggcttgaacagatatgttggctattactgtatgcttgacggattggaccgggtagtcgttagcaactaccatttagccggagaaccagggctatgagacgacgaccttggtaggtgtatgctgcacttgtatatactcgatgtcttgccgtgacgaacatgaagtctgctggcccatggccccatgctcgaggccgattggcttcacacttttgatctagcatagcgccaacaagtggcatacttgcgccaggtaaatgtgctgcttgagttgccgagcatcgcctgcatctctctccttctgacacagaacttgcggtgcttttaactaagactactttgtgatgcatgcggtacccgtggaacctggcgggctgctgaaccacagcggatagcgtcgtggtagtgatagtctcgcttgatgtggtgcagctccttcctattagcttgttgaggccgctttgagaccgtatgatcgtcagatttcgatctcaaagttgacgcctctactggtttgcgggctttggcccgcggtgttcgcagttcggtctttttttactgtattccaaaacctgcacagtagaaaactttatttactactagtagtactatgtagtaatagcgcgatgcttgccgcagaagagcgttgcgtgaagacgttcttgaattttagcgcttgctcttatttttgtactgtgaaatatcatgcgtccatttgctggctgctcgatctgccgtggcggatctacgtggactcacactattgggctgctaccgcgggagtccccgtatgcggcgctgcagcagtgcgcggcgacggcgtagtcagccgtcataaccgcaaatttcatttcattgcatgaactcacactgctattcatggtacatactgcacagcttcaagctgccagactgagattcggttcagaatgtataatgtgtttattttctggggttatgcgatgtaatgtccaaatttgacgcctgcaacttgattttgtaacgacggcgacctacctattgctcgcttgctgccccgattcggtcgattcctcacaaatcgcattgactgactgatcacccctctttattattgctgctgcctggttagcttgtcgccgaaagcatgctttgagctgtaatgaatcggagtttgcgctgctgtgctgtaatacaattcctgtacaactgccctacagtagctcaaatcccgttctgatgcaccgtattcaaagctggcaaaacttacggtaccatcgcagcgactcggaatgaactacagggtatgtatggcgcgcagattccgcggcgctgaggctcgagtggtttaaaggctcaattcgaaatttgctccccacctctcaagtcgccaaacacccagaacaagaccatgtgtatgtccttcgcgctactggtagctgctgccaccattctcctcacgaccaaccacgctacgggcgtctcggcgttggagtcaacaaacctggctcgctcactccaagttaacgagcacgtcggcaacgaaacgagatccctccgcatccatgaattggaaaacgaagacgagaatgatgaagaagaggagaatgaaggggacggggaagaggaagagagagctggcggagcgaacctctttgcggagtccaagctcaagcagatgatgagcggagtgaagctattcaagcgattcaagaactggaaggcctacggtctttcccctggcgacgtcagcatcaggctggagaatgctggtaaatgggacgactacaaagagctctacttcacgtaccagaaatactactccacaatctaatagagaccaacggcatttcgtagctctccgcgatcaagacgatgctggtaatctgtcgaataacaagagcgatatgttacttcgattcacacaagtcgcgagccttcgtgattttcagcgttccttccgcctccatactattgtggtggagtccctcagataaaaaactaataaactcccacacgtgtcctgccctgcaactacggggggttacccctgcaagccaaatacccaaatacaacgagaactagtcccgagatctctaggcctcaccttgtgtacccttgtagcaagactcggatctttatctagcgtaattcctagaagacgtgtaatatgaaggggtgaatatggggttccttacactcgcaggcagagacttaggttaactctgtcgcggatgcacttgtacagcgaggtaactcttcccactgtacgacaacttgttgtacaatatgtacgagatctactggagatctcgtgccgcagctagtctgcgggttcaaaccaaagtgcgagacgcacaccaataccttactaaaccgtttagagtgtcctactgtcgaacactgagagctgatctcctgagtccagacaatgcaacacactacgctactagaaggttaccggggaggccaaatcaatccagaaccccgagtacacttcgcaagtaggtaggaaacagtcacagtacacacgtaggcgctaaccgcacaacacaaagactaatatgaagaagtaccttgtctcgttgttggaaattctgaactgaactgcctatctaccagcggctcgtctgccggccaaccaaccaaccagtatgctgcacgcctttacctcatgacgtcatctgctgtctccgtgcggtgtcatcgtccttgttacagacctccccgttctggatctccgtaaatacgccatcgggtttcgtaatcagtcgccggccttctatacgggatgccgagctagggtgtcccataattcaagtggctcactctcgggtcaccttcgggcaacctccgggtccatcgcctcacaatccttcaacccgcattacgacatccgccctctcttcgcgtgaggctatcgagcaggtggctgccacgcgtggagctcctgcaccatgtctgcttctccacccacgtcgtcgccttcgtcgtcgtccgccggcgtccctctgctgagtgctgccccgtcgtcgacctacagcctgggtgattgcaccgcctgtcactcccttggtcgatctattccggccgcggctccatactccggttcgcagccatctctatcggaacgggcgcgcattatccaggctgctcaagtcaccgcggccctcgatcacgaggtgctggatctccggggccgtcttgacgtcgcccaggatcttcttgaagcatctggtcgccacactgcaaggcttcatcgatccatccatgatcgcgatctggaggttcaacgcgtgcgcaacgaagccgacggtcgtctccgagatctccagcaggctctgaacaccgaagtagaacgccgtcagcaagccgaagctgctgaacaacaagtacgcgcagatctcgcacgggtcgccgctcgctcagctgatgccgatgaagtcactctgtccgctgcagcatcgccctctaacgtcgtccccagtcagttggagatcgccctcggagatctggatgatcgagctggcagatatcaaggctacctggacccctcctcccactgcatcggtgactccaggtggccgactgttggctgccagcaaagctgccactgatgataatcggactagtgacggacgcgcgggacgtgccctgcaacgatccaatgccgaacgagacagatctcgcaatcaattgcgccaagcggaggcgacaatcgacaggttgcagaccgagttggcgcaatcgcgcacgctggtcaacaaagcagcgccacggatggacgcccttcgcttggatgcgtccaaagctcgtgaggacgcagaatcagcacgatgagaagcggcggcggtgtcgaagaaggcgcaagacggtggtaagtcgtcccaagtcctgaggttgttgatgttgcatcactaacgccttgatctccacagcgacagcgttatcagatctcgcatagcggcatcaggtggctgggaagcgactggaggagttggagaggaagatcactcggctgactcagcataacaccgttctacggcgtgagaacgtcgtcttcaagaacagtttggagcatcgtctggctgatctcgcaacagctcaggatcgcgcagtggctgcaggtcatgatcgcgcgtgctaatgtggcgggttgactcttgtgctgacctgtgcgtttattgctttgtagaacgagagcgagcggaggcctccctcgctcgcgacgacttgcaggcggagctggatgcgagtcgacagtcgctgctgaaggagcaggcttcttctgctgatctccgcagcaaactagcggagcgtgaggaacaccttggagcgttgcgcaacttgatcaatctggtacctgcgccgactccgcaacctgaggtggaacgatgcgtggcgtcggcctgttccagttcgtctcttgccacactggcgtcaacggccacgggccttgtctcctctgatcctccagcgcgaacatcttcgcagcagctcccgtctggctcggcaaagcgaagtggagatctctcttctgatccaacgtcacagttgaagcgcgcaaagcgcgccgttgcgagcgccagctaagttgtcttcctctacggcgatgggtacgtagctcctcctcattgttagacaagcgactttcaaagatctccgtctgacagcccgtggatctctgtatcagcccgaagcccattcacgcacgcaattccacctgagtccagcgaagctgcgcgccctgccgatgtcacgccgtggctgtgggtggttgttgcaggtcaccgccttgaccagcttacagccaaagacctcgcttcgaagttcttaccacgcgactggctgctacccgccggggtgtgcaaccctaagaagggggagctggccgttcctgctgactatcggccctggccacaagcctcggtcgaagctttatacaaagcgagtccctggaagatcttcctggataacatgcccgacccagtctcgttcgatattggagatccccgcttccaacctcttctggccatcatccgcgatgtgctgactcggaacgataatcgtggcgcgcttgtgttctgggagatcacccactccatcgagatttccatttccaaggccagcgctgagtcttgggaggtgaagttcacttcggatcgtaagaatcggagatcccactttatgaagatgctgctgcctgtgttcgaagaggtggcccgcctgtgcaaggctcatttgtgcgacttggacattcttctggagccattcttcctgccgctgatcggaacgtgcccgtggttccctaagggagcttctggtgcctctggagatctgttacacgtcttacgaacgactgacgaggcggagccgtggcgcctgttctactggaacgctcgtgccaaacacccatcgatgaacgaacccatccacacgcgccttcgaggcaagttcaaggcgccctcgtcaatcgcctagcatgagtcagttgaacagacctaggaggaccaccggaaatctccagcatccgacatttcttccttcaccaatgtacgtagctagtgggtagtctcctcgagcatgcatcttctttatcgacatcgtaatacaccggcttcgactccatttcatatcactcccgccccacaacttaattgtacacagtcaatgtcatgactgggagatctccccaactggagatgtgaaggcatgtcgtaggtagccgtgcattctgggaagtgatttgtggtgatcaaggccatagcacaaactccaggcgtaggactgcacttagtccgacagccaccgacctctccttcacgccctcggtgtctcctgcactgcggctccgggctggatctccaagtcggcggcgacagcgatccggccaaaatcgacggaacgcgaaggtacgaacggtgccggttttcaccatcgcacaggcccagagcgtcgtggcgagcgcgtttcagcagccgtcggacgcgcgctcgcaccccaggtgcctccagcactgcgacaccgggctggatctccaagtcggcggcgacagcgatccggccaaaatcgacggaacgcgaaggtagtctccgacacgaacggtgccggttttcaccatcgcacaggcccagagcgtcgtggcgagcgcgtttcagcagccgtcggacgcgcgctcgcaccccaggtgcctccagcactgcgacacggggctggatctccaagtcgcccccgagtactcgttcgtcgtaattctaatgtccgaccagatcatcacaactaacctcgtttctccattccatcgcgtgctcttctctccatttcttcttccactcaatcaaatgtaaatgtgcaacaaataccatccaccattacggatagcgtccaccacgctaccccccaacaccgcctcactcttcggcgatatcggcctctccacgcgattgcatcagatggaacctctgccggctccgtcgcttctgctggaagtcgaacagcagaccaccatagttcaggtgttcttccttgacccaattcgtctccgcgtggcccttccaacgcaccaaatattccttgagccgtcgaccgtagcgggtgcgtctctccgtcttgacatccaagatctcttcaacttcatactcgttgtcaccgcgagtttgtgcctcccagctatcctcggggagaagttcttcgtcaaagtcaaatcgttcgctttcatcaagagtgagatcttcggcgggtcgttcggggaactgtcggaccagcttcagcttcgagatgtgtacgatagggaacaacggtagtcagtcccgctgatttccagcttggcagcgtagtcgctcaccatggtggcgactctgaaaggcccatgccacatgtgagcgagcttccgagcgtatccgaccttgactcggtcgaggtacagccacacctgcgatccctccttaatgggtgactccggtacgttctcattgtgggcttccgcgcgactctcacgagcttcggcgaggagacgacgagtctctgtctgagcacgttggtattggcgttggatcttgaacctccatttctgtgggtcgagatctcagcttccggtccctccaacagccaacgatgcctcaatagtcgttttagggtcccacccgtgcagcaaaaagaatggcgtgtccttgcgtcctcggtcgtgcgatgtgttcaacgcaaacaccaaccgctccgcatattcatcccagtcctgttggttctcgtcttcaacgtacatctggaaatagtctggaccatccgctccgctgtgccgtttgcttgaggtctatacgcgagcgtagatcgatgacgctggcccagcagcgcattaaacgaccggaaaaagtcggacatgaagctcggttcctggtcgtgcctgattacttcgctggctccgtaccgccgaaacacgcattcctcgtatgcctcagccactgttggtgcggtcctgtccgcgtttgcctttgccacaacgaagccggtgaagagatccacgaagactaggagctctgagttgcccttgaacgacttcgggagggtggggatatgatccatagccacgacctggaaagggtaattagcggcgatattgcccggcgatcgcccccgcaaggtgggttttccttttcccgtctcgcagtcgacgcactccccgacatacttctgcacacttcggaacatacctcgccagtagaaatgcctccgaagcttttggaatgttcggctgactccctgatgacctccctccactcttgtgtggaaatgatgcaggagatcttcgtggagtgtactcggtattaccagtttcaccatagatccacggtcctcgacatcaccaccgcgcccctcgactggacagtacatcaagaggccatgctcgtcgacctcgtaactgtcagccagtttactgcacgtcttggcttgacggctcgagatctgagagagatcaccgtgcaggaaacacttcagtgaccagatccacacctcctcgtcttgagcacggcaaatacgttccaagcacagctgcttgacgacgtcttcctgcaacacggctggtgcgacagtacgagatcggcttcgcgtgacagcgcctaccttcggatgggcgtcacgttcttcgcgcgtcttgaggagctcgtccagtcgattcaaggtctcgaggtccgtgtagtcggtgtgactctcgacaactaccccggcaccacgctgcagcgcctgtcccgccagcatatccgcgggttggttacaatcgcgttttacgtggatgagttcgcattgcggccaagaccgcaaaatcactctggccttctcacgcaagagctggagtcccgatgacttgcactccatctctccacgcagttggcggatgactaaattggagtcgccacacacaatgagacggtcgatctggagatcggcaatcaaacgaagtccgagaaggaggccatggtactcacagtgaggtccggtaaatagccagattcagccttgacaaccttccatccaggagcatcccataccacagcgctgaaagctccaccaactcgtttcggcttggccgatccgtcaaagctgacgacgcaaacgttttctccgggcgtaaaagtcggcatcgggatagccaatgctctcgtcgacttcttctgcggagagatctcctccaacgctgcatccatctctgcgcgcggagtgatactggcggcaaccaaacctagtagctcatcttcgcctttcgataaacgttcgatctctagcgaatgggggggagagcagcgccgcccactgagctagccgtcccttcaagcctttcgcgcggaagggccatgcgagagtcgtgtgtctggtgagcactcggatgtgtcgaccactcagcatggtgaagcagctatcgaggattcttagcagagccagtacttccttctccacaatgtcgtacccgatctcgtgagaccgcagtgtcctactcgtaaatttgacgggtacgtacactccatcacgacactgaacgagagaggcaaagatcgcccacttgtacacaatcacaacatgatccaactctggggcaaaatggtagagcatgggtgcgttgatcatcttgaacttcagggtatcgaaggctcgtagcgcgtggccccatctcacagtcgcctcgtgatttccgctgacgtttgtggctcgacccttgatgaaatcggaatctccgaactcatacaacactgtggcatatactgcgaaatcttcgatgaagcgattgtagtagttgagactgccgaggaatgactggagagccttaagcgtttagggaaacttcaacgcctccagacttgccaaatctttcggcttggtgaacaggccttcaccggagatctgatgccccagatagtcgactttgctcataccccaactgctcttctccgcgctaatagacagattccagcggtcacaaacctctaggagcttcttgaccttctcacacacttcgtcccacgagcttgctccaactaagatgtcgtcgatgtaagagcgacgccccagcaccaacggcagcgatcgatcttcaggaacaccttcctcgaaaatgttgacgagatccgcgcgagcttgacccggctagatccgcagcacgccatataacgcattgtcgatcagccgctgatagatttggggggcattcttcagaccaaacggcattcgcagccattcgaacaggccgaacggcgtaatgaacgcggagatctctcgggctcgatcggtcatactcaccacccgaaacccactcgccatgtcgagagaacggaaccacagcaaactgtcgagatcttcgaggaggtcgtcaatcaacggcatggggtagatcatcagtcgtgtcagagcattgaccagacggtagtcgatacagagtcggacgtccacgccgttcttcttgacgacgataacgatcggagacgcccaaggagaagtggagatccgaataatcttcgcccccagtagccccctgacgagttggaacaccttttcacggaactgaggcgggatccggcgacaacgctgagccaccggtcgtgcaccaccaacgtcgatgtcacagatcgcccccgttgccgcagggggtaaagcattccctttgccgatgagaaggtgacgccgctcccagatgatatcacgcagacgatcaatctcctctgctgtgttctcagttggatccccgaccttgagatcttcccttttaacttctgccgtcagggagatctctggtaacaccgccatctccttttcgatgtcttccgcagtgagattggccccttcatgaacatacttcgcttcatccatgtcggttgcatctccgccttggcttggttcgacctgggtcactgggagcattccgctcaccggctcctcttctttctcgtcgtcggtctgccagtcaaaactaccccagctaccagtagactcagcgctttcggacgcacagctacagctatcgctccagtcgctttcaacgatgaccgacaacgtgcgatgaaccatttcctcggtggccgcggcgtgtattttggattgtggtatgaggtcaggggtatattctgggaactccttgcggagctcggcctcagccacatttgccggagtcgacgccaagcctaccggtgttcgtaaaggataggccgctctcctcgcctgcgtgagtttccgtacgcggtagactggagtcatcgctgtccataccagagatcacctgaccgggatcggtagagatcacgtcctcctcggtttcggtcaccctagtcggatcagtcgaactttcatcagctgcatttgaggatgtgtgtcgtccactgtgagtcgcgtgcattcttctgacgttgctgctgcttcaacggtcttcacttgtggaggccgtgctaaaatcgcagtcggagtccggtagctacgacgctcgaccagcggtccagactcttcaacttccgcttcgtttgcatctccagtgttcacagctgcttcgaacgcaagtgtttaccactcccgatagcggtttgaatccttcctagcgaatccaggtcgacgcgggatccgcccaacgggtaaccagattgccaaacacaccaaacgatccagtaccaggcggctcgtgctgatgttggtgatccggaggtatgacttgttactgaatccaccattcaccaccgtgatcacccatttttcccctctcgttacccacagttcaaaccgcttgctgtgggacttgagtgagatctctgtccattggccaggaccgacttcatggaatcccgttgcgtagaccgcgccagccttgctgctatacagtggcttacggtcgtgcgaacttcgtccggcagacagagcgttccgtcagccaggtccaacctcacccccgcaggaaccataaaatccatgccgataatgacgtcttgtcctgagagatctccaacctacacacggaacttgtacaccaactctccagccagattgagcttgacttctgctcggccttctgtgcggtacacagtatcccccacaccaacacaatccattgtctgtgttgtatcaatttcacaacccaccttacgagcaaaggtagagtcgattatcgacacttcggctccagtatcaaagagtaggacggcacggacattgttgaccgcaccggtcgccttcgacggcttgaactacttggagggagtgtaatacttccagtaacctcggcgttcacccggcgacattcgaagggccatcacacaagggcgacgcaaatagtcatcttcatccgaggtaagagatctggctttattcaccgcattacaggaagttgggtcttctaacgctcgcgccttcctctgaacatatgcataaatgcagaacttcgatcgctcgtcacgtaccaggctgttcaggcctggcgagcggtctagtttaacgccatctcgacgctctcgggtagcagtccggcatggcgagtcgggttgtaccattgccgaacagcatcgaagaagtcgccgattttacactgacctgcttcgtgaacgtctccacagcacttgcagacgtagaagcacttgtcggtaggatggcccatgcgtccacacttctggcacgtgagcctcttccagcacccgagatccgtatgcttgcgagatccgcagtgtgagcatcgagtgccgtacttcgggcgccccagttggtcttcgcggtcttggcgcgcccctggctgttcaccatctcctggtgtaggcgtcctagctgccgaaaacacgtgcgctctttcgtcttcagattcgctatcggaactgcttaattcgccctcgaactcgttgagatctccgtgatctccgcggcgtccgcgaccggtagtcacaacccgcaccgccctcgaggaggctgcaggggcgggagccttttggcggtatttcgaaccttgggtctcaatcttgcgacgttggtggcggcgtcgcatggccaacaggatcccttcgagagcttctgagtcaggcagcctcaacactaccagagatccggcgagatcgtcatcttggactgtatcgatgtagtggtcgacgtgttcacgtcgttgttccttgatgccatcatggatcttcaagtttgcacgtatcccggccagattcagccggtataagtaatccagtgggtcttcctgactcccgcgccgcatgtggtagtacttgcgcgcgagggagataccttcaccgcaattgtgaatctggaactgttcacccaggtcagtccacgacgcgcgagcggtgcggctcagctggtaataccaatagcgcgcagggcctatcatcaaatcggcaaatgtcaagcacatctcgtctggctgcatctgatcccgtcggaaagccgttctaaccttgttgaaccaggctcgggcggcttcttcgtcatgttccttgccgctgaagtccttcagttcggacacagccgatgctcgcaatttagtcgccgtggacacagctgcgacacgacctccggttccgccacctccatcatagccgaggtcctcggataggtcatggagatctccttggtattccggttgtgtctgggatcggtacccgatacgtggtcgagcgggagacgcagtgactggttgcatctcaacgtcttcaggctcgtctcgctcattcgcaaactggtaaagaaggtcttcagccacaccgccggggcgatcgggctctgttgcaacctcttgagcctcctggatcctcccacgtggtcctctcgctgggcgagtctgcgcaatatttaacacttgcgcagacttcccgcgtcctacatcgtttgcagcgatcgctgggatcccttgcgcacgtcgttctcggcgggacacacgtggggccggtggaggcttcttggttgaggtagtgctcctcatgagagcgtcaccgtcatcttcaaacttgaaggagatccgcgaatcgtccaaccgaggaggtgtgaggtctccggtcggcaacggcgcggatgagtcatctgcactcgggacgagcttctgcaacactgcgtacacccccgcgagcgtaaggacggtggtttccagatcgtactcgcgtacatcggtggagatccgctgttcatgtaccttgtaaccagcatcttcgagcacgcagaacagcatcgtgacggcgtgaagcggatctcggattgttagcgtgcgcgggttgcgaactggacccgtgagaggccatggcatcgtcagccccaacttacgcaggagcggatctctctggagcagaaacgcaagctcttgacggaagtagttgacttcggcttcacgaaatcgtttgtcttcatcgtgagtgtcgttgctggggccatggaccgctagcgccgagatctccaatttctccgttttcttctcggctttcttcttcgcatcttcgacttccatgtagtccatcgcagcgtctagagcatcgcttcgggcagcggggtcgcgaatgacccccttcagatgctcgcgctccaggtttcgacctcgcttttcagcgacgccggggtcccgcttagcagcaggtccaatggaactcggtttttggaccgagtcccggacggctcctttcggagccttaacggggaacttctcttcgtaaacgaaatccttcggctcaggcgtccccattgtctgtccgtcggtggacctagtgttttcacgtttaacttccgccggtcccagcggagttccgtcttcccttacctcacccttcaccttcacgtcccctttcggactagtagatccgggcacgcgcaccattgtggtggagtccctcagataaaaactaataaactcccacacgtgtcctgccacgcaactacggggggttacccctgcaagccaaatacccaaagacaacgagaactagtcccgagatctctaggcctcaccttgtgtacccttgtagcaagactcggatctttatctagcgtaattcctagaagacgtgtaatatgaaggggtgaatatggggttccttacactcgcaggcagagacttaggttaactctgtcgcggatgcacttgtacagcgaggtaactcttcccactgtacgacaacttgttgtacaatatgtacgagatctactggagatctcgtgccgcagctagtctgcgggttcaaaccaaagtgcgagacgcacaccaataccttactaaaccgtttagagtgtcctactgtcgaacactgagagctgatctcctgagtccagacaatgcaacacactacgctactagaaggttaccggggaggccaaatcaatccagaaccccgagtacacttcgcaagtaggtaggaaacagtcacagtacacacgtaggcgctaaccgcacaacacaaagactaatatgaagaagtaccttgtctcgttgttggaaattctgaactgaactgcctatctaccagcggctcgtctgccggccaaccaaccaaccagtatgctgcacgcctttacctcatgacgtcatctgctgtctccgtgcggtgtcatcgtccttgttacagacctccccgttctggatctccgtaaatacgccatcgggtttcgtaatcagtcgccggccttctatacgggatgccgagctagggtgtcccataattcaagtggctcactctcgggtcaccttcgggcaacctccgggtccatcgcctcacaatccttcaacccgcattacgacactatgctgtatatctcacaagaggatgcttgcgtatcaagtagaatagcagcactgtccctgctggaactacacacaaataaaattctacttcaggttcatacgttagaaggttatcacggttgcctttattttggttcttatgcagatcaggtctgggatttgaacatgctgattatgagaccgaatcggtagacctgaacgaaacagccacagcagtggaacatgacacgacaattcttctccatgctccgttcaacgttctgccctgccaagtaatggcaggacttcttgtaggtgaaggtggtctacgttgaatgagcagacattatgcagtagcaaggccctgatgccttacaatcacgtctttagtcatttcttaaagcctgcgcctcaatttgcagtattctgctgctttatcgagctggcagtcgcagcaagatgcatagacggtaaccttgcatgatgggctctcttatatagtgaggcaattgtattcgattcgatatgtaaactatgcattggacgtagcaatgacttatacgctaccgtgtaaggcagcacggtctagtcgctcctgcgagcgcctttgagcagtatggcagccaaccctcagtgttcacgccgcttgacatgcttcgcgctcccatgcgaagccagcgctctgcagggtgaagaattcgcctgcacgaacctcgcgttgcccctccgtagcgaatatgacaaccgacgagaagtgcttggtgaaccttatcacgcagtcacgggcttgggtgccacgaaatatccttctccttcttgtagcgggtgcgcggagtgcgcacgggtgcccccaaaacgtgctgaccgcttgggagtgcggcgagacttgacctacaactcatcaacgaggcgaactgcgtcttccccaccactccgaatcctcgtcgtagagcttggacagcacagtatgtcgagctgcacgaagcgtgggcgaacttgagtctgtagttgtcgtggaatactcgaggtcaatgctgcggcgaggccggacgtgggcgggccgaccgccgtcatggacttggtgtcctcatgctccattcatcttgtccgcgtctatcgtcgccgtacacggcgtcgtaggctacgactcgtaacgccttgtctccgaccgaagagctcgtgagcggggaagcagaagctgccacctctgaccgtcgtacgggaacacgggcctagggcgcaacacacgccgaagtcgtcgccggcgcagcgaaattcagacgggtggcatttgccgtagctgggtctgagctccgcggtgcccacggtgagctcgacagacctgcgattctccttacacccacgggctcgggcgacatcgaaagcatcgagacgagctccgccgcggcggctcacgatcacgaggggcgtgccgcgcttcacacgacgagcgcacccacgcccaccttcttcttggagcggaggagttgtctcgtgcaagcggcgacttgataagcgacgagctcgagggagccgcgggcaccttacgccggcgtgccgcggcctgctgctgcatcttccagctccatgtccagcagctcgctctggcagcctgggtggagaggaggctcggtccatagcgggttggacgatcagggctggatcacctagctgctcgcaacttggtgataccggtacccaccagcgccattgcagccactgcggtgagctcgatggcgttcatagtctacggtgaagtggcttttgtcgtcaaaacatggcgaatgtgatccaatcacgagatcatagaaaaagtacgcaatgatcaaatccaagacctgttctgcggttgaaaaaatccccactactcgatccagtcagcacgtaatggtagtatcatatgcccccaacaagttatgatttaccaccgagtggtgccaacggacacgtgttgaagtatacttcgtactagacatgcataccatccgaagcgcttcccatgaaagcctcaaactgtaatctagcccaagcggatctactgacacgcggcaagatgagaaccacagaacggccacgactggcagcagcgtgacttggaagtgaccagaagtctgccgcttcatcgtcaaagcaggttcgcttcggtggtgacgcgtactcctctctggtgctcgcccgcaagttcaatttcgatgggctatcgatcgatgaagacgaagaggaggaggtggagagcgtcctgggtttcctcggtgacccagtgtcaccaactccaaattaaacgatacctagcttttgaacgattccgtcgcgagctgacgtgtccaagcagcgtaccgtcacgcaatcgccgctgcagcaaccccttgcaagagagttgtttcctgcacagaatatggcatacgaaggcgctgcaatgcgtgctttaaggttcggaccaacatctcaagggtaattcctttgttgtcgatgatggcattcattggggtgggtcttggtaaaatgcattccataagactttgacagcaaatgttaagttccgcgaatcaagatggacgcgaagcttaatatttcatttttaaccctgagtcgaagcaagcgctagctagggtcgtaagtgtgtgatgagctatctgatgcaacgtgtcaaccactcagtaaaggatttttctcgaaatgcccgcatataaatttaaattcagcggccggtagacctgtgttgctcgcataagttaagtgaaaactgttcaattcgattcactcagatagaatgcttagtgtgtttgaaatcataatcgatgtcaacgttgctaaagccagcaaatattggttagtagtaaggtgattgctctgaagctgcattcgtgtattgtgctctgaagctgcattatgcaatacacgcttccttgcgagtgcaggtcatggggacaaaaggaagtccattcacatgtttagccgaggactcgtagagtcaggttgtggggcgtcgacgcgtgggtgctgaaccgcggcgccggcccgagagctggatcggagaggccgacccccccccaagatagaggcgtgcatgtgaatggactaagcctgcatgataacagaacgtacacatagtgagagtactgggtccgcagtgacttactgggagaccggcatgcaggttgataagtgactcggtgtgttacttgagcttccgtcagcgcttgactcccgcgaggggaccgtgatgagggcgagtagcgtagacgtactcctgaaaaagtcagactcagtcttgagatcgaggcccgaccatgtgggttgcggcttatcctggagtaaatcacgggggtacgcgtaaagtcaaaacaggtgagacctagagtaagcttttacaaaaccggatatgttactagtgacaggccgaaccgagacgatcagagtaagctcctgccattcgtcagttttcgctcaacatgagcagagccgacgaggcaagcggcagcgactttgcctcgtcttcggacgaagaggggcagcaagtcagagcgactcgtagagcgttcgttgtgtgcgaggtgttcccaacccttgaagaggcgcagattggcatcgacgtcttagacgggttccactacaagtacaaacacaactacggcaatgctggcaacggtactcgtaactactgctgcatgtcccatgttaattgccccaaacggctgcggctgtctaaggtggaaggcgaagcccggacgaaagcggagctcagtttgttttggaggagacagacatgcatggagacgaagatcaagacattcagcgccgtggaattcacggtgcgctgaagcgagagatcgacagcatcctgttcggcggcgctggaccaaagaagtgccggaagctgctgctagatcgtcacggagacaacccagtcatgcttcagcatttacccacggaaagtcagctcaagaaccgaaaagctggactccggaagaaacagtcaggtatgatgtttttggcagctctgtactttattttgggttgatagtaataattctgaacaattgtggttgtcttgcatttggttctgccacaggtgggtgggagattcacaacttcgcaactctactagagtgggcgtacacacatttgtgtacatcgaagagtgacttctttggtcacgaagacgacatcagcgctgcggacgccgcaacgcagtttgccaacaagtcccgccagtttcagcacggtgtgatcgttcttgagtgctttgaacacgacttcattgaccaggatggcaaggcagtaaagtctttcgggctcatattgacttcgcgtcacatgctcctgaacattcccaaggcctacgaatgccagcaggatattggtgtcttgggtgctacggatggaacatataaactgcatttcggtaagcttcgaggtgtgttactagtcgtggcaaggtgcattagctgaccgttttctctttttttgtaggtggatggaccctcgtagactttgggacctacacgacgcactattcgcgaaaacagtactccaaaacatttgtcccttggatgtatatgtttgtcaagacagagcatcagacggcgtacgcaacgctttttcggactgccaagcactttgcccgactgtttttcggagtcgatttagcccttgcctatggcagcctcgataggacccaaggcattgcgaacgcttttaaggaggtttggcctgatgtaattctccttaattgctacccgcacctcgtgcggaaaagtcgagagaagatcaagctactcaaggaccctgcgttctacgaagacaacgtgctaccggacattcgctatctcagtaaagctcgctcggccaagcagttcaaggcgctcagtaaactctttctcgagttttggatccaacaaaacgagcgagactacgccaagtggttcgaggacatttacttgggtgacacgtgggggaactggttctacgtcgccgccgccgcaggcattacaccgtcccagaatgcccttgaggctcatcaccgcgtgatcaagaaggtgtgtgtcgggacgcttcgggcaagtacatcggtcgtcttgaacgactcaattcctagtattcttggtctccaagaaagcgagccggctcgccctgctctaagccacttctcggaaggtaagatgacgtttgtttatcatttgctaatggtgtgtaccgattgattttattattcgtgtatctcgtgcattctaggtccgttcatgagtggtgtagtagcgcgcgcgcaaacgcttgtccaagagaagtctaatcactacatgatcaaggacacgggcgaagtttgtgaaggcgttcttgtttaacgcttccaagttcgtggtatcgcccaagaacattcacagtgctgttttgaaccgcgaccgtgccacaatgtgagtattacagctgtgcgagtcaaagttgttaagctcactatttatttgtttcattttggcagctacaggaactccatcaacggcaaactaccgccagggatgactgtaaacctggtggaattgcactgcttgtccattcaccaagttcgattactgagcagagatccactgctcgatggtggaatgataacggctgcaccatcaatcccctcccaaacagtacgttcagtttgatatgtggtagtagcacacttaggcgatttgaatctgacactgtcactgcggttttagattcaggcgattcggaagaagtatgtgtgcgactgcgccctgttttatcaaacagggtggcaatgctcccatgtcgtcgctgccatgacattgcagaaggagatcagcattcaagggatgctaaaggcgttgccaacgagaaagctaagtggtgggtagcgcaagcgcgtgggtccgcccacagaaggcggagacaacactcaccgattctccgtcgacgtgctgattcgagagttcttgaagtaccctgccagacccctacattggaacctcatgaaggaatccaaaattcccgatgactccggtagtgaggtggagcagtttctgttgggaaaggggatctcgtggggggagaccaacgacgtcttcttctggatgacgaagttttccaacggtgcgcaagtcaagctggagtgccaagagttagccgagtgtcttaccagggcctacacccacggtgcagatgttgctggagccgtggcctattaaggcgatcaatggctggtgacaacaactcgaacgtgctaggttgtagctagcatttttttcatttcgcatatcgagtcctacgatccattttcgtagacaacaatacacgtttcgttacattttattcacagttcttcgttgctagcaatacttcattcgtacccaatttctgaatactcgtatctcggctttagttgtttgggattactcgtagtgcctctttttggtgtgttactcttggtatcgccaattttactcgagattaagctcgttcggtcacgatactatccgcgctcttaggttttgcggcactgtcgacttcgattctagtgaaaaggatgaatcccagagtgaagaaggtcgtccagtcagctcggctgtcgatacgtagcttcacttcacaggtgtcgtctatctacccgacgcctcgtgccaacgccgcccagcaaattaaggtgtcctctctctttggcggtgcgaaaatgaatcaaattctgccggtcgagacccacgaatcgcgtcaccccctcacctctttcgagcagaattgtcttgggtgtccattcaagaggctcttctacgactgcgacgattttgcctacgtgacgtacaatgggaagcgttgttccagtgtcgaggcactgctgctcacgggatatttgtactatggcagacacatctaccaagcgtcttccgtgcaactgctgcttctggcgcgcttgttgccacggaaaatcattcgcacgttcaatgttctcatcctacgatggcaagtggatccgaagacagggacgataacccacgcgctgtcctgcacgtggtacactgctagcatggagaatcgcgcatcaactagcgtgacgccagtagcttagacagacgaccgcaacggatactctcgccacatcgaacgtgtatgaacgccgtattatttattaagatactcacctatccgcattatgagagtttgctcaacagctcgtcgacagctttgagctcatctcttagcgacatcaagcggtccgttgtgtcttctgccctactctgcaccccaccgaaatttagcacgagctgtgcgcttgcagactggatgtccaggcaaagttgcctgcgtcgctcttgcaactcctcaacactcaaaccttccagttccggaaattctaccgtttggtcttgtgcatcgggcgtagaatcggtaggcgctgcttccaacaccggcatcgcaactttttcggggcgatcaatgtcctgtaccggaaacagctctcttgcaaggggttgctgcaccggcgattgcgtgacagtattatgcttgggcgcgttcagctcgcgacggaatcgttcgaaagctcgcacgaaagaggcatcattcaactcggcgctggtaacgctagatccaccgaggaaactcaggacgctctcctcctcctctttctcttcctcctcgtcttcgtcgattgacaggccatcgaaattaaacttgcgagcgagcaccggggtggagtacgcgtcatcaccgaagcgaacctgctttgacgatgaagcagtggacttctggtcgcttcgagtggtcggggtggtcacgctactgccagtcgtgggcgttctgtggttctcatctggccgctcgtccgtagatctgctcgggactgcatggtcactgccgctgtcactgtctgctgctgtaccacgtagcgtgtctggcgacgaaccctgttgtgacaatgtcgtgttcgtagaggagactggcggagctcctccattcatccccaagccaggcagattgtccacacccgatgaagaaggtgctagagtttccgccgtggttgccctcgacactccaaagttcgggtatctcatccgaatcgtcgtccctcgtcgcggtgtcgaatccagcgacgaaaacgagtacgcgctcgagctgaacgactcgtaactgcgactctctcgataatccacgctcgcgtcactgcacgaaccgctctcaaaggagcgtttgcggtgcggccgccttccgcgttgccctccgtcgttctcctctctagttcgcatccccgctctccgcttgtgcgccaccaccccgccgtgatgcagcagttggtccctcatctgcaccgacttttccagcttcaacatcgtctcggcgaacttcaactgcagcgagaacacgtcgttcaacgcgtcgggcgtgttccggtagtgcactctcggagcagcctccatcgtccgcaccacaggaacctcaggaaccgtagaaccagaagcagccactgcaggacggaacgtcagccccgtcctcgcactcgacgcctgccgttgcgttgaagacagcggctccagcgtcaccacccctccaatggaatactgcgtctccgacaccgactcattgttgcccaggtgcaccgcactagacccactcctctgcgtctcctgaggctcctcctccacctcctcctcctcctgtggctctgcatagctctccatctctgcgtctgccgccgcctcctgctccatctggcgctgaatgtccgcgcgttgctgctgcagctcggcaatcgccgcctgccacgccgctcggcgtctgccctgctgctgctgctgctgctctagtccctccagctcctgctgctggcctctgttcatctccgtctgcagctgccgctcgagctctcggcgccgctcggaggctgcggccacttcgcgcatgagccgccgccggttccagcgcgtgacggggcgacgcggaggcgctacatcctggacagaggacgaggacgagtcggagctcacgggctccagccccaggcgcgcgagcgagctctgcagctccgccttgagcgcgagcagctcgagcgagttcgacgcctgcatcttggcggcgacgttttgaatttgaaccaatcaccgcgggaaaaataatagcgcgggaaaggagaaggacgacgagaggtgggtttgttgtggggagacacatagaataggaaagataggaggtgcaactggtttgattgacacgcatggcgacacttacagcggtaatggagccgttgaagtgcaccgtcagcaagcttggtagacgaagtggacacagtggagtgagatgaaaaatccgctgtactaacttacatatgcacgtccgcgtcgttccttcgtagccagctgagctcggctacagtagctcgcctttggtcctgtctgtcctctaactatccctctcctgcgttcgggtggagcggcaacaacgagtctgtccgtctgcttgtctgtctatctcaacctctgtccacggttgcgctgccatcagagcgagttccttgccttcgttcacaccgggcttgattcgcccagttccatcaactgactggctcgcgtttacccactgaagctcaaaactacagcagcaaccaacgcaccgacagcgcgtctaaagtcgcgggtagaagggcttgatgccgaactgcaccaccgtcatgacgccggcgcccagcgcgcccgccagcaccatggccttggggcccgccgtcgacttgtagaagacgcccgtggccgccgacgccaggatcggcgtcacctggtcgaacttgacgatgttctcgatctccgccgagtccgccacgtactcgaacgccttgtagatcatagctacagtcataacaaacagtaaaacgtcagttaaaactccaaattgcagctaattgactgcaaaatgccaacgcaccgagacagccgagcgcgttgccggccttggagccgcgcgtggccgcgccgttcatgagcgagttcatgcggatcttgaacttggtgctgggcgagcgcgcgaagcccgtgagcgcgccgtacgcgccgccgccgatgatgcccgagaagtaggcggtgccgcacgagccgctcatctgctccatgaaggggcggccggccttgtcgtagtccaaatagtcggcgtcgtcgtcgtacgaggccacgccgaacacgggcgcgatggcgccgatgtcgatgctgcccgacgggatcgtgggcagcacggggaactcgaggccgctcgtggcgctcgagtcgaagcccgcgcccgagcccgacgcgctcgagtcctgccaccggtcgtccgagttccagctgcttctgctcatgctgcctgaggtctgtagtgttctgtggggagggggctaggaaggaggaggagaaggaggagaaggagggcgagcgagcggagagctgctgctactgctgacgtccgtccgtgcgcttctggggctgacagcggactgccctggccagccagggtaaacgggaaaaacctcggggaaatctattctgaggcgaggttttatcgagaatggtggtgtggtacccatcaaaacagagcgatcattccagaacaaccatgtcaaaaacgtcaacatgcacgtcaaccaacccccaggaatggagagaccttgcgagagctttggggcaggcaggctacgcacgcgccgatctacggccagatccttagtttatcgactttaaccctgccatcgtaccgaggaactactgccgcatcctaaagagaccggccacgccgctgacctcccacaccgtcgtcgacccgcttcgccaacttatttcttcttgccgtacctgcagcaccaatacaacagcgggttagccttctcctgctacggtactcaacgcaacttcaaccttcacaggcagcaagacaggcagaaacttacgactgctgggtgtcgtgcaggatgttgagcagcagcgagtccgagttcaggtagaccttgttggccgagcgcgagatgaccgtggcgatctccttggcggcgtccaggcgacgcagctgcacgaaggccgggttgttcttgatggcctcgccgacgagctcggccgacttggacacaccgagggcgcggatgaccgtgctcttcttctcctggatggcgcgctccacgacgaagcgggcacgctcggcgtcctgctgggccacctgcttggcctcaatagcggccgtgtactcggcgccgaacgtcaggtggatgatagacacatcctccagcatgatggcgaagcggtcagcgcgacgcttctgctcgagtagcaacccgaacagcaagacaagatccaacagagcaacgtcagtcactgcatcccccacaatgaagtttaatgttgcaacacgtaccaggttctcgataatgagacggctgacgtggtcacgctggaagatcagctcggcggccgtgaactgggccaccacctgcttggccacctcgttcacgatcgaaggcagcaccttgtcgtcgaagtctggcagtagagatcagttaataccttccccctatggttacaaatctagccgatagccagcgtaccgaggccgaggttctggtagagccactgcagacgcgagcggtcgggcttggacagcacacggatcgagatgttgatcatctgcaggtccttggtgcccgtgagtgacgcgtaggtgcgcgggcgcgtgcgcacgtccatgatcagggggcgctgcagccacgggatgaggaagtgcgtgccctgctcgatgacctggtggcccacgccgtcgatacggctgtagaccacggcgcggtgtccaggcggcacgttgtagatggacaggtaggcgccgtagatggccgcgcccgtgaacaccgccaccttggccagcgccgcggccgggcccttgctgccaggcggcatcttcatgttcttcatgttctccatggcggccttgcccttctccatgttagtccccttcaatccaagtccaagtcgaaagtcacggacgggagccacggagccacacagtggggctgtaccaaaccactggtacgtggtaccgtcattctggtcggcttgcgcatcctaccaaaacgcatgccgaacctgtcgtagcgcacggtgagcgttcctgcgctgcgattggctggttgatattggtggccagcggccttgggcgccattgcggcggccgcccccgacgtctccactcccatcgcattcgcctgaacaaaagaagtcaccaaaatgccgaagatttcgcgccaccgcaactaccgcaagacctaccgcacgccgtcgcgcgccttcgagaaggagcgcctcgaccaggagctcaagctcctcggcgagtacggcctccgctgcaagcgcgagatctggcgcgtgcagtacgcgctgtccaagctgcgcaaggccgcccgtgagctgctgacgctggaccccaaggaccccaagcgcatcttcgagggctcggccctgctgcgccgcctcaagcgctacggcatgctctcggaggacgagaacgagctcgacttcgtgctgcgcctgaacgtgcagaagctgctggagcgccgcctgcagaccaaggtcttcaagcagaacctggccaagtccatccaccacgcccgtgtgctgatcaagcagcgccacatccgcgtgggcaagcagctcgtggacgtgccctccttcctggtgcgcatggactcggagaagcacattgacttcgccgtcacgtcgccctacggccagggccgccctggccgcgtcgcccgtcgccgcgccgcccagcgcgctgccgccggcggcgaggaggacgaggagtaagctgttgatcattcgatagcttgttgacttcgtgctcttttggctctttctctctctcggctgcgtctggcgcgcgtgggatcgactgactacaggaacctctcgacggtcgcgcgcggacgaccagcttcggagtttgtttttcggggggtcagcaatggcgtccgataaataaaatatcatgcgaatttggggacttcacaccgtttgcgctcgcctcaggtctacccttggttgtatcttaggcttggctggcagggagggaggacaacgtacaggtcacagacaggttacagggatttcaggttcacgcagcaccatacacttgcagtggtgtagtacaggcgagtacggtgtggcagcgagcttgccgtcaagtggtgacaaggctgctagaagttcgtcatgtgacgctggctgcttggaacacgctgctgactcatccgatatttgttcgttaaacgtgcatccgaccacgtgctaggaccctttcacacaaactgctgctcgctgtacagtactctcttgacctgtacgcacccatacctactccgcgacgctcgccatgttgaggaggttgtccttggcgcgctgcagttggccctccgtgacccctcgagctggcgccgcggtcagcgctgcgatctgctggttgaaatcaccggaacgagcgtacgcgcgcgtgctgtggtcgcagacgaagcagcccagcgcgcggttcaaatcgcctgactcaaccgcctcggcgctcttccacatgcgcatcttctcttcgagacacggcaggtggtagcagtggccgcattcgaacacgcacgcgtgaaccgtttccatgccggatgacggcgcgcgcagcagctcactgcaaattgcgcacgccttcttcgctgctacgcgccgtccgcgcttgtgcgctgcgacttgacggtggagcagctccacccggtcgttgtcaaacaccttgcgcgagccgatgcaaaggttttgctgaagatatgcaataggagtcagtcatgttagaatccaaggagcagtagctattgaagatgccacatacctggactcggtaattcgtgatgatcgcgatcagcttctgcttgaggttttcaatctccatgtcgtcaggaatctgccaacgtcgcagagcaaaccagtcatgtaagatagcgctagccgataggtatcagattaatgctgcgtaccttgcgaatcagcttgatcgggtcgatcttgtgctgcgaggcgaacttcagcagctcctccacgttgtccttgctggtaagactgagatcgatgaggtagtcccataggccctcatcgtggtcctgcacaaactggatcgcctggttgatgtcgccacgctgcgtcaagataaggtctagcgccttcttgtgttggcccatgcgacctaagatgtagatcatcgtatcccaaagaggaggcgtgtggtggctgcagtacttgtaggcctatcagacacgatacacagaacaatgtcagagccccacactgcactatcagggcaataccaacgcagcagttaccttctccaatggcacgaagttgcttgtctgcaggaacttgagcaggaattccggtgcaaactcagcatacagtgcaacctgcttctcgtgtaatgccgaataaatctccgaattgtactcgcccaagcgatgcaagacgagctcgtgcagatacgtgtgcagcagctccggttcgccctcaagttgggcaacaatgtcggtgatcttgagctgctctgtctggttgaccaacatacgcactgcaatcgccttgtcaatgcgcatcaggttcaccaccttgttggcaacgagagaccacagctggtgctcggtgatcagcttgaatgcgaagtccttgttggagcaaaactcgccttgactcaggtaaatacgcagcgcgtggtcatactgctctgtggctgtgtacaactccgccagagcctccatcaggtacatcgtctccacactcaatcgatctgcgtccgcttcggcgatacgtcgacgacgcacaactgtctctagctgattaatccatgcctgcgcatcgtacagtggctcaaacacatgcgtcgtctcagtgtactcaggtgcgacatccccttccgactgctgctttactgcaggtgtatcctgccgcctaggcttcggccacttccggatgagctcaaggagctgacccggatctgagtccaggaagtgcttcaacaccatttcatactgcaccttcggtaaccgcgggcttgccgtcggcatgtagcgcgcgatcgcactcagttgcccacgctgggcaaacacatatacgtacttctcccacagcttctcgtattcctcgcctccaccggtgaaaagtcgatgaatctcctctgcggtcttttggaacttcttctggcgcaacaagtcgccaaggtaagtttccataacatcagtgagcaccacacgccgaagagctcgtgggtcatgcagagccacgtcaagtgctcggccatactgcttccttgccaatgcccactgtacgcggtcgtcagcatcgcgcaggcggcagatgacgacgtctttcggggtgcacacgtaggcaagttgaccgtaacctgcatcgtaaattgaagacgggtcggtcgattccaggtttgactggtgcgcgtgcgcgtagcgcaaagtaggcatcatataatccgacgcacgcaggcgctggtagcccttgagattcagcaagtccgcgctaacttgtttaccatccaaccgcacaacgtgaacctcagggtacggcatctcgccgctctctccttcgccttcaatcttggtcgactttccttgagacatcgatggccctgtagatgacgatccagaccccggaggtcgaaacgccagcaccgacacgactgagccaccaccccacggactgatgcctgtaacgaaaaagtcgaacgtaagcagcgccaccacttccgccgtaatagttcccgatgaattctctactgcatccaacgcggcagccgacgtcggcgatcctggctgtcctgagtgccccttcttgaaagtcaccacacgcagcgtatgcgcccatgctaccagcagcacatcgttgctctgccactcgagatggcagcgacagagctccatcggcgggcaattgggcggccgctcaatgtacgtgatgcgctgatcattgtccgagtcgtagaccttcacgccccaatcgttcgcccacgccacgagcccgtccttccagcggatgagctgcacggggccctctccttcatgcaccgtgctctccttgtcaatgatccagcccttcttgttgatgatcagctgaccccccactccaccgcacgcgaagctcttctcgcgcttcatcgcgtatctgtcctcgagctgcacggcgtacacggcgctgaagtagttgtagatgttgacctctccgcctgtgctggacacggagatctgtctcgccgccgcgtccttgccctggttgctggcgtgcttgtgtccactgatgtccgaagctccagcgcctgcagacgtagaggggaagagcgtgtagacggccaccgtgccgtcgtccgagcaggaggcgatgaactggcccgtctcatcgatgcacacctggttcaccttcttgtagtgctggtgcaggcggcggatgaagcggccgtccagctccagcagcagcacgttgcccccgtacgtgccggcgcacacgaagttgacgtgcagcgcgatgcagctgagcgagtcgtccttgaagatggcgtggaagtggccgcccacgcgctcgtacttgagcagcggctccgtcggctcctcctgctgcgaaatacaacaacaataccaataattgttttgatctgattagcatcaaatggttatttgatattgctttttctcggggtggagagcgttgtttcgagtgcgcgttgcgaggggagacgcgcgagaagcaggcgcgtgggatggagggaagacgcaccttggtctcctggctggcgctctcgggcgtggccgacgacgacatggtggtcaccggtgccgcgatcttgcagaattgcagactgggaatcaatttttggtccgagattggctcggaccaaaataaaggtggatttattttttgtgcaaaaaagctgaaggacaatcactctgggaaacttcaacaaccgctggacacggacgcccgttccaccacctgactcaggtttgcacttcaatccacacgaattcgtcgccaatcctgtcactgctgctaagaaaagctccgtcacaaggtcttcagaaatagaggcagctcgccgaaagcgactcaactctaccaatagcagagcattttccattcaggtcttctcagaactacatacacttctatcagctttgctttcaatgtctgcgactggagaccaagaagttgcttcctttcgctggacgacgactcactaccagcaagagcgcgtcaaccgcatgaatcgcaagcggacgagtcttctccggccttccgtctttgctgcgtgcttggcgattgcaggtcgtgtggtgctgggcccgctcgcggtgctgctcctgtttactgccaccgactacctcgccgacgcgacattcctcattgaggtggaccgcagcttcttcctgtacacgcagcgcgacttgtccatggctggaagctgcaccgactgcgtgggtccatgcaagattggacgccgtgttcaacgaggaggcgctcaccagcttaccaggcttttccgctctagtaggacacccaccgacggaatcgttgtacgacttcagcactttgagcggtgaggccatcgcgctcggagaggaactcgacaacagcggtgcaatttgccagagtggcatcaacgactggggagccatcaccagcatcttgacagcaacgccccaggaagttttggacgtcatcagggtgctcaaccttaatgttccgccgcaaacagtgcaagagctcgagctgggcgttgaacacgcggacgagtgcgtgaccaactggagcattctggccattgtgcggctgttctactttccgacatcgctgagtactagagagttcggcaagatatccgctggggctatcaatgtgttccctgaatactccgagtgccgaccggaagtgaccgttgatgttggatcaaagctcgtgcactcaactgacggcgtagacttgtttgctactgcgccagatgcactgaagctcttcccctacagcttcacgagcagcatgcccgcacagtctcgcgtagtagctgcttcccagacaaagtacggggctacgacggtgctggagccccagatgcacgcatattacggagactgtcgagtgcgcgaagtgaacgctacgggtatctacattgaaagctcatgtaatgtgtcggagcactgggagagttatggtctgatggtgcaggcgcccgagaacgtcccgctgtgtagtaccggtggagtttgtatccgcaactacttcaacacggaatgggaattgatgacgaacatccttagtacagaaaagtctaccagcaccgccatttaccaaaacacgtaccggactcgatacgctgattcagtggggatcagtacgctgcccggggttgtcgtgatgcaaatactgttcatgggcgtcgtcagcctctaccaagtgatgtcacacaagcgctccgtgctgctcactcagatttgggcttaccggtgccagaacggtcggatgcagcccgtctacctcgcgcagatttcctaccacttcttttacaactcggatctgtacttgctaggctttgccactggcactttgacaaacgaatcgattgccaacctggtctgctgcttcttcgccttctcgtactcgttcgtcaacatggcaaaggcgcgttcgggtgaccagaaactagatcgagaatttcggctggtgtgggaggccatgcagatcgcgatcacggtggcagcggtggttgcattgaagtgggtgcaaagcactccgctggccactattatctctgacaacgctcagattttgcgtaagtcatcgacactcggcgccaaatactgcggccttaatgattcatgcatcgtgttcacagttaacatgattgtcgtcgcgatattcgcataactgagtgtggggatgacggcactcattgcctcaaaagttgcgaagcagacgagctgaagaacaaaaagcgccgggtactcaactcaaccaagcaagaaagtcagctcaggtcaagtcctgacgtccacacaaagtgacagtgttggcaaggagtcaaaccgcagtcgagacagcagctctgatggtctggagctcacgtcatttgagcagaactgcatcggagcacctttcgacaggctgttccacgactgcggcgatatcgtctacgttacctacaacagcaagcgctgcgttaccgtcgacgcagttcttcttgcagggtatctgttctatggcgagcacatttaccgcatttcgcatgtagagaaacacaccccatgtcataggtttaggttaattactgcactcgagcctaaaaacaatgtaaaacccaaaaactgggtcatgcgatcatttcgtacacaaaattggcaagatggttggtcatgcggatggcgcggagcgatctcctctaggatggcgcttaagctagcaacaagtctaggcgccatctacaactatgttgcacaggaaccacaccacttaaccaattatctacagcgttgcttcttctactaccatcgctgcagcagccgtattgtgcgctctctcgagcttgcgcgttgtggtttaacctcgtgctccccatatcccgcactcatcaactgggcccacaccaggcgtggctactaactatcactccgacgaggcgtatgcctccaagcgcgcggggagggggcagcgcgacgttggcgagcagtgcgcagctttttccctctgccttcgcgcgcttggaactggtggctcaatgtgcaggcaaaaatgcgcaaaatacccaaattaggggtgtatctctctacatgcgatccccacggacttttctctcgcatctctgattggtctaaacaaaggtgtaactcttaaaccgctgtagcgctctacatgcgaaatgcggtaccaggcgtcctctctgatgctactgctgattgtccgatacgttccgcgcaaactgcttcgaacatttaatgtgctacttctccgctggcacatggacccgaaaacgggcacgttgacgcacgtacagtcatgcacctggtacacagcaagcaaggaagaccacaagcttgctcaagcagtccccgtggcctagttcacaacgacagtgtcgttgcgaacgtcgttacgacactgtgctacgaggtttctgtatgatagactgtacagttgtctcagatcaatctacacgcgaaagcgttgtcggtgacttacagcagaataaactgaatatggaggctccgcggtttgagggacctgagtgaacagctacacattactattaaaaaaaaaattttgccgcccgatttgacgtgttatctcggagtccgatttatataaaatggagctcctacatgatcggttagtccaatttatctatatctgacccgagttagtagcataaggctcagaggagaagcattccaagttggccatacctccccacctctcatgacgctttagaactgcaagacattggggacagcagtacactgtatatagccacttcatatcactatggccagctaaatcacctgtgtgatcatctacggccgctacaacttcgtaccacgccgatctgagagggccccagacatgttttcgcggcggtcccttttgccggcgaaaagcggtatttatggcccctgcttcgcaactcgcagcccccagacgcaaatcgggccagatatagtttgcttccctcagcccctccggctaaatcggagccctccgcccgatatatcggatcttggaccacccgatttgccaaaacggcaatacttgtaacttaatagcataagtatcatagtgctattgccgtttgcagatattttggccaacgcatgcttattatctcgttaataatctcgattttaggctagcaaattcttaaataagacctaggtctgaattatatatatcgccagtattgccgtttgcagatattttggccaacgcatgcttattatctcgttaataatccgattttaatccagccagctcttaattaagacctaggtctgatttatatatctcgccagtacggtctaagatccgagcttggggctctgttttctcggccaaggcgcttttctacgacttggaaacgcagaaatgccattctagacgggccaaaccgagtttctgggcctaaaagcggcccccatcaaagcataaagctaaatcagccctcgcctatctcgtgtccactcatattaagagacaggcgtggtctattttacagggcaaagtcggcaatacctatatttatctattatattattttacatccagactcctgaaggcacattaatagtactgatgtgccttcagcgtaaggcattcgatgacaacgacaacgaacaacgatagtgactggaagcggtacctgaattacgtgctcggtcagtggcaccactgcacgaacgaacgcgggcgctgcaatcgcgccaggccgagccgtggacttggcgtaaagcacgagggggcggaggagccacacagcttaaacaaaccaaatacaacccgtttggtaaaacccagcgccctctgttgtgatatttcctaaaccttcctttgaaatgttcgcttgttctctcatctcatgttggcaaatatcgccatggacgatcgcaagagtcgtcaggtatttcgctcggaccaaccagcccgggccccccgctgggcagaagtcactcgccttttagacgttgacctcaggcaatggcgggatgcatatttcactggaggggctgaagagcctggcgcggacgccgagtaaggaagacgcgacagaggcgatacgcaaagtaggagccccaacctgcagatgacgggctagcatctgcgggaccggtcgttgtagtcgttaggaagaactaagtgacaacaatgtacctcaattcaaaaagaaatttatcctgcaatcgataagagctcgtcagcggccttgttgaaggctctcaaatgatggttccacgtgcacacatgggcccgatctgctaccctctgcattacgcgtaaatgctccgtaaatgtggagctctgggcggacgccgtttcctcatctgcgccaatataatcgcgctatcgcccaccacgtggagatcggtcagtccgttggtgagtgtgtagttcagtcctgcacacagtgcccggtactctgctttattgtttgtagttcgtcgcgatgccaaagaaatgctcgccatccattcaacggtaggtgtcggttctccttgaggaagcaagactatcaggcaaccagagccaccaggaccagggtttccacgggattctccgtcgaagaacagaattgtaaccggcttcgatagcgtgatggacgtccacaactgtgattcccaagtagagcatatgaaactatcttggcagcttcatgtcgccctcgggatggcgagactattgcaggataaatatgactgcaaaaaaaacgatcaacagggtggaatcaccgcgattatcacgcatagcacttcgatgccctccccggaatagtactcttcgatacgatacttcaagagtaatcaatctgcctgcagagcacagtcaacagggacgaagcaaagttgagagatgagcccttgggtctcatgagtcttaaggtgggggcgccgtgtcctgctgcgatagatacaatattacgactacagaaaacagtcaacagggaggaatcaccgtgattacatattacttatatcatataagttatatgcatgcagcacttcgatgttcacctctgaacagtgtactgtatcctgcgataggatacgtcaagagtaatcaatttgactacagaatacagtcaacagcgagaaatcgcgcaaagggggtcattgtaactgtggcaaagcccccaatatttacatcgcaaggttctataatgcatcggagcgttcggagagttatggtctatggtagtgccatcgtcgcacaagccatcgtcgcacaagccaccaagaacatctacgctgtgcagtactggcctgcatccgcaactacttcaacacggagtgggaattgatgacgaacatccttcgcacagaaaaatctacctgcaccgccatttaccaaaacatgtatcaaactgatacactgatacagtggggatcagttcgttgcccgttgcccgggccattggtattttaacagacatatcgattgcaagcgtggtttgctgcttacttattgtacttgttaatcaataaggtaaagcgtgttcgggtgaccagagactggatcgagacgttcgactcacgtgggaggacacgcagattgtggcggcggtgtttgggttgaagtcgatgcagcacacatcgtgtccacacttaacatcattgccatcgcaatagtagtatcaatgagtgtgggaatgatcacactggttgccttaaaaaagttgcggtaaaggtgggtcgcagcagaagatgcgctcggtattcaactcaaccaagaaaaaaaaatcagctcagggtaagccctgaccacacaaagtgacagtgttaacaagtagtcaaaccgcagtcgaggcagcagccccaatggtctggagcccacgtcgtttgagcagaactgcatcggcgcacctttcgacaggctgttccacgactgcgacaatatcatctcacatgctactagcagtaaacaaggcatgttggctgttattcctaattcatagctccactttatcgaatgaaaggcagagccttcctagagcaggtaacgcagctacgaacgcggcgattataaactagtggtgtacgccgaaggatgttatgaactcacgttagccaggctcgcgatcgttgacgcttttgacatcagcatagtacaagtattaatagtaatgtctctagggtttgacagaaaaaagtatcaaaaatatgatataatcgataaattataattatgttactatagtagtttataacttcgcatgtagcttttctaatacaaaatatagtatttttcgatcgcttgtattactatctaatttctagcggcattttggcgaacgcaggggcccgccagacacagattggtgcttgcttggctttatggagggagaaaattggctgctggtaggtataatcgtgtgaaaatggttgtgcaagggcagttcgtcgcacagggccggcctacaagagagtttaaaggctattacctcgagagattgtagcgttctgcgtgggctaattctgcaatcatccacttgcccgctagatcaagctcatccatgaagtggaccagctcccgcggctcgttctccaacctaaccacgatcgatccatgcgtgtcagggtgttcaccgcgtctgcatcaacgagctgtacggcgtgggcagcttgtcatcaaacacttccacacggatttgggacgggcagtctgcgtgctgagagaagcaagggtcgttaataaagcacaacaagaaagcgatccgtcgcatggcacttgatggtcaacagcgagaacggtatcttgtttactgttcctctacaaaaacgtcaaaattgttctcacttaccaggctgtatattatttgagcaacgaatgtgatgtggccaatagggatttcccgctgaaggatggcagactagcaggtcccgtacgcatgcatgcagttgatgcctgaattaagctgacctcgctccagttcaaatgctaaagtagcatccctagtttctagctaaatacaaatagttcgtacaatcccgcgcctttatttttggcaacgatcgctcataaattttcctagagtaacttgctgcgtaacccctttctggtcactcggtcattgttcgtttgttgccaacatggccgcgactggagagcccgatactgactcatctctctgggcaacagagtattaccgccaccagagttcccagcgcctgaatcggaaacggaagagtcttctccggccttccgtcttcggtgcgtgtttggcgattgccggtcggatcgtcctcagaccgctggcgatgctgctcctgttcaccaccaccagttacctctcagacgcgacggttctcatcaagcttgaccaaagcttcttcgagtacacgcagtacgatctgtccatggctggagggtgcacagactgcgtgggtccgtgcaagattggtctgctcaagtacgccttcttcaacggagaggcgatcacgagcgcgcctgggttttcagccctaatggggacgtccccgaaggaatccctctatgacttcagcaacttgagcgctgaggccatcgcggtcggggaggagctcgacaacagcgacgccatttgccagagcggcatcaacgactggggagccatcaccagcatcttgacagcgacacctaagaagtcctggacgtcgtgaacgtgctcgatctgaatatcgcgccacagacgatgcgagagcttgagctgggcgttgaacacgcggacgagtgcgtgacgagttggtgcattctggccattgtgcggctgttctacttcacgacggcggtggggagggcgcagttcggcaaggtgtggtcaccgtcttccctgagtacacggaatgtcgcccagacgtcaccgttgatggcagtactatcggatccaagttggcgttcgctactgacggcaacgacttgctctcggatgttccggatgtactcaagctctacccctgcatcttcactagcagtatgcccgcacggtctcgcgtcgtagcagcctccaaaacaaagtacggcgctaccacaattctggaaccggaatgcacgcctactacggaggctgtcgggtgcgcgaggtcaacactactggagtctacgtcgaaagctcgtgcgaggtctccaaacactgggaaagttatgggctgatggtgcagactccggaggatctgcctctgtgcagcacaggtagcgtctgcatccgcaactacttcaatactcaatgggaagtgatcagcaccatcagcgcggacaaccccaatcgaaccgccattgcccacaactcgtaccgaacccggtacgctgactcggtagggatcagtgttctccccggtgtcgtggtcatgcagatcctgctcatgggcgttataagcctctaccaagtgatgtcacacaagcgctccgtgctgctcactcagatttgggattaccggtgccagaatggtcgaatgcagcccgtttacctcgcgcagatctcctaccacctcatctataactcggatctgtacctgctgggctttgccactggcactctgacgatggaatcgatagcgaacctgacttgctgcttcttcgccttctcgtactcgttcatcaacatggcaaaggcgcgttcgggtgaccagcaactggaccgtgagctccgactcatgtgggaggccatgcagatcgcgatcacggtggcggtggtggttggattgaagtcggtgcagcacacgccgctggccgccattatctctgacaacgcacagattctacgcaagtcgtcggcacttggagctaagtactgcggtcttaacgacgcttgcatcatgttcacggtcagtatcatcgttgtcgctataatagcatccgtgagcgtgggggtgttcgcagtcatcacctccaagatcgcgaaaaagatgagtgccaaggcaagagctgccgggtatatcgctcagtcaagtacgcgagtcagctcagctatcgtagtgctgcgggctggcatgaaggattcaggtcaaaaggtcgaccccagtgagccccaactcacgacgttcgagcagaactgcatcggtgcgccattcagcaagctgttccacgactgcgacgacatcgcgtacgtcgtgtacaacgatactcgctgcattactgtcgaggcagtactcctcacggggtatctgtactacggcgagcacatttaccaggcgtcctccgtgatgctcctgctgattgcgcgatacgttcccagcaaggtactgcggacgtttaacgtgcttctgctgcggtggcacgtggaccagaaagcggggactttgacgcacgtgcagtcttgctcgtggtttagagcaagcagggagagccacaagctagccaaagaagttcccgtggcctaagcctacagtgtaagcaacattgataaagacctattcgtatcgtaaagcgcttcctgacaacttttgaacgcatgaaacagcacaaagttgtgaaagctggacttgggatgtggggtaccgtttccgatccactaataacttgtgatagaacattattagatgcacgtgatggcggttggagcttgctctcgctgtacatggtagtgacgacgccggcaatgagcccttcctctccatgcctacgtaaagcagtcgacgtaatacgctcaagaatatgtaggccacggaaccaggtgtgggcgacggatctgagccaaggcgctgcggagaactggacgacaaactactatcaacgcgagaggcttcgtcgcaaaagccatggatggagaagtctactacaaccgtcagtgctcggtgcttgtctagcagtcttcgggcgcaccattgtcggtccgatcgtgctgctgttgctgttcactgctacgaattatctctcacccgaagccacgttcctcatcacgtccgaccacagcttcttcgcattcaccgagaaagatttgtccatggctggcggctgtacagattgtctgggtacatgcaagatcgtgctattgacgtatgcgctgtacaataaagtggctctcacgagtggacctccattcacagcgttcaccggtatgcccccgacggagtcgctgtacaatttcagctctctcagtcctgaggcgctcgcattgggggcgtctctggacgccagcgacgcgttatgcctgagtagcgtcaacgagtgggggtccgcgatgaacggcttgaccgggacgcctcagcaagtgctggacgtcgtcaccactctcaacctgagtattccgcagcagacaaagcgagagcttgaactgggtatcgagcgagctaacgaatgcgtcaccacgtggagtatcatggcgcttcctcgactgtttttattcccagtgtccgtaaacagcaccgagttcggcgaaatccccgctgtggccatcaatatcgcccccgatgtgaccgagtgccgcccagacgtccccccggatgagagtcttctcggctcgaagctggctcttgctacggatggctgggacttgctggcggacgttcccgaggcgctcactttgtttccgtacagcttcaacagcactatgactccgatctcgcgtgtggtcgaagccggcgaggagacgaagtacaaagttgataccgtcctggagcctctgctgcacgcgtactacggagcctgtcgagtgcacgaggtgaatgctacaggcgtgtacattgaagacacctgcgagatctcgaaccactgggcttcttacggtctaatgacccaatccccggacgatatgccgctatgcagcaccagtgacgtgtgtatccacaactcctacaactcgcagtgggaatggaccagtgaaatcacagaatcggaaccaaaccgcgtcgccatgtacatgaacacgtttcggagtcgttatgctgacaaagttggtatcagtgtgctacctggcctggtcgtgatgcagattttcatcatgggggtagttagtctgtacgaagtgatgtcgcacaagaggtcggtgctgctcactcaaatctgggcgtatcgctgccagaacggcgctactcaggtggtgtacctcgcccaaatttcctaccatctcatctacaactcggacttgtacttgctcggattcgcgacgggcacgctaacgaccgagtcgattgcgaacctcacctgttgtttctttgccttctcgtactcgttcgtgaatctggccaaggctcgttcaggggaccagcagctggatcgccactttcgattaacctgggaagccactcaagttgtcatcacggcttgtgtggtcactacactgcgagtggtgcagcggaatccattggagtcgattatctcgacaaacgcacagattttgcgtaaaacttcaactctcggggcgaaatactgcggtctcaacgatgcctgcatcatttttaccgtgaatgctccgacactgatcgcactcttgtcgaccattttgggcctcttagctgtgaccacatcgctgatagtgaagaagaccagcccgaatgttataagggttgtactgtcatctcgaggttctcagggaagcttcaaagggatcagccctacgcggaaaactaaggcacaaccaaagattacgacggttcgatttagccttaacaagaagaaccagactctgccactcgatgttatacgatcgccagcgtacaatcgtctcacttcgttcgaggaaagctgcctgggctcgccgttccgaaaattcttttacgattgcgacgatttcgcctacgagacgtacaatgggaagcgctgtacaacggtggaggcattgttgttaacgggatacctgtactatggagaacacatttaccaggcatcgtcggtgctgctactcgttttggcgcgtttgttgccccgaaaactcctccgcaccttcaatgtgctcattctgcgctggcatttgaacccgatcaatggcacgctaacacacgcattgtcctgcacgtggtacacggcgagtaaagagaaccatgcactgaatggaatgacgccagtcgcttagttagagatctaaaacaaataaaatttgtaagtttgtcgttgtggacctcgagaagaaaaaattaagcaaaaactacagaaaaatcgctcaggaaggtcgctcacaaaggcacatttactatggaagagctgcatttagttaaatgcagcagtgaatctcggcacacaagttgtgagttgatccttttgctgcttggtacaagtttggtcgctgacttcacgccaccctccgttacgtgctgagcggggcaatggaatctgcacccccgcgtttttcttctagccccttgttcaccccacactgtctcattgtcaggcaccatggtggtcacagcttccgcgaggtacgtatgctgggctgtaccttgttcaagttcgagagatcctgtactttgggaacccgatcatagcactgatcatgcgattcaaccagaggcgcctacggccaggactgtgcggtctacctccactacccgtcgatttttactcgtcttgcctgtcacccactccccactccacagccactaagaccccgaaatcgagaaccgaaaggcgactttggtgcaatcgttgccttgccattgaagagctcacgatccgacgaccaactgcgtacatgttccgtactcgctctatttaaggtcacattgcaacgcccgactcggcattcagtcgacaaagacaccagcagcaggcaggcaggcagacgccccaacgcgtctctcctcctctccctaattgcatcctacccaccagctccacgcacatactgagacacatagtcagcatggccgccccgagtgacgtgagcgcgatgctggacgtggccatcgcggccgcgcgcgccgcgggcgcccacatgaagtcgcacctgagcacgtcgcgcgtggagaagaccaagtcgagcaaggacgacctggtgacggtcgtggacaagcagtgccaggacctggtcttcgccaccatcaagcagagcttcccgacgcacgagttcctgggcgaggagaacgtcgcgccgggcagcgaggcctcggcgcgcgcgctgcgggagctggccagcaaggagtggctctggatcgtggacccgatcgacggcaccaccaacttcgtgcaccaccgcccggccagcgtcgtgtccgtggcctgcgcgcacctgggcgacgtggtcgtgggcgtcatctacgacccgtaccgcgacgagctcttcacggcgcagcagggcgagggcacgttcctgaacggccagccggcgcgcgtgagccacgaggcgtccttctccgaggcgctcgtgggcttcggcattggcaccaaggacagcgtgaggctgcccatgctcgactgcgcgcgcgagttctcggccaagtgcagggggctgcgactgcagggcgccgcggccatcgagctcgcctggacggcggcgggacgtcagtcggtgcgttgccgcagcggcgttgtgtgaggttattgttgagattggtgtgctaacgttgacgtattggtgctatcggtttgatgctgcggcaggccttctacgagctggacctgaactcgtgggacgtggcggcgggcgcgctgctggtgaaggaggccggcggccacgtgactaacagcgacggcacgcccttctcgctcagcacgcgcaacatcgtggtgtccaacaacaagggcgacatccacgccagcatgctcgagctcatcaagaaggccgacgccgtcaacgtgcgcaagtaaagacgaagactacgacagattccccactttagagtaacgcggagcgctgctatcattcatcagcctccctccaatacacaactggcagcaattcccaagccagtctccaacgctattataacgttaaacacagcagagcaaccaaaaagggtaacttcctgcacacgtacgtggcgatcgtgccctaacctcctctctcggtatcatttccgaccaatcccgtgccgcctcgtctattcttagcagcgaaatcggaacccgatactcgccgtacacaatctttgtgtaactgcagccacaccgcgtcagcagctcagtccccaagtagcaggctgagcagcagctcctcccagcactacactactacgacgccgagatagagccatggagcagcagcttccggcgccgtaccaggtcaacacgtggttcttcgtgtgcgggccgctggccgtcaacacgttcctgctggggctggcggccaacctgcacgtcttcaagaagcacaacctggccttcgaccgggtcatggacatgcggccggacgaggtccccacggcgcgcggcgtgctcaagacggcgctggccatgaccctgctgcagctgctgctcttcaacggcgaggccgcgcgccgcggggacgcgttcggcgtggacgagacgcgcatggagatgctgctgctgggctacgcgttcgtggcggccgcgctgctgctgtgcccgctggacgtgctgcactacaagttccgcatgttcgtgctgcgcaagctcgcgcgctgcttctggcccttccagcacttctccttcaagctgccggcgcacgccacaccttttattgaggtgttcatggccgacggcatgacgtcgctgtccaagttcatccaggacctgtctgtggcgctcatgctgctgctcatgtcgctcaacagcgagcccgaggacgtccgcgagtcgtacatctccaagctcaaggagtcgccgctgccctacttcgccgccagcaccccctacatgtaagtgctgtacactgatgatgtgtaagctttggtgggatatcttacgtttttatttatttattttactttaattgcagtattcgagcgacgcagtgtttgatctcgttccaacggacgacgagcatgaacgaccggttcctgcacctgctcaacacgatgaagtactgctcgagtctgctggtgatctcggtgggggcgtatccgatgctgatggggctcgcgcggcccgagcagagcagcttcttcctgctgtgcgcggtgttcaactcgctgtactcgttcctgtgggacgtcgtcatggactggggactcggacagcccaagctgcctcgacgcgtggcgttcctgcggcaccaactgacgtaccgcccgcgcaagatttactacgtcattatcgccgtggacttcgtgctgcggatcatgtgggtgaccaagtggtgggattggatgcaccgcggcgtgcacttcaagctcgtttcgcaggtcgcggaggtcgtgcgtcgtatcatctggaactttgtgcgcgtggagtggcagtgcatcaagctggatatcctcggcaccaagaagctctccgcggacagcctggaactcgaagacatcattgagaagatgccgcttatggaagaggacgaggatgacgacgtagaagacatgaagccaaggatgaggcctgtcagcagacctaactccttctccgcggagaacagcggcacggagacgagcagcacactgagccagagtccccctcgcgacggcaacggcggtgagctgctccttcaggcgatgcggaacgctgccaattccgagaacgcagcacccggcgccaatgcggagggagcacagcacgacgagatcatcgctcctgctgctatcacagtcgccagctaccctgacaagccacaggcgatgctgatcagcggcggcgacctcacggcgtccacacacctccgacgagactcgagcccgaacaaggcgaccaccagctctgccgacggcgcggtggtcgacgaaatgtaaaattgaagcgtgaatgacatgcgcaaagacaaagtaccacaagagatagatgccagctccattcccttcctactccatacgaaagaagcaaattaactcgttcaaaacggaaccggttgtgctctaccttctccggttgactcactccaaagcttaatgcacatcggcgctctcgacgcatttcttgagcggcgtgagcgcaggacgcagctcgctggccagcgcgtgcagcgcgccgatgtgcggcgagttgggcgccacgagcgtgatcaccagcggcgcgtggttcatgtggatcagcaccacgtcgtcgaagaacgccgtcacgctctgcaccgccccgaacttgagcttcccaatctgcagccacgagtgagtcagtcagctctactccttctcagcattttagccccactgcagcctgctcctgacctgctctgctgcgccagcaaagaccgtgggcagcaccgtctccgtgtactcgtacgacagctccgacttctcctccgcagtcactgcagcaacgtcagccacactataaaccacagcccccaagctcctctgcatctgatggcgtacctttgagcagcgggacgccctcggacgtgcacaccaggatggcctccagcgcgtcgtatctgcagcaaaagagcagagagatccgactataagaacccttgggggctggagattgttgaggcggtggcgtcgcacctgctcagcacgtcgttgagcttctcctgcagcacggggctctgtgggtagtttccaagcagagttacagtgcagattaagttagtggcactcatggggacgacgcacagagcgcggagcacttgccatctcggcggcggcctccatcgttccaagctcgaatgtgtatatgaaattgtgtgctatcaaaaacaaattgggatttagtcctggtatatgatttgagcggatcagtttggacgaaatatttgcgaccgtcgagcagcgacccaaaaagcaattttccttcattgcggcatcgtagggggggggggcaaacgagaagttcgttttgagtaggagccgaggcttgaactgctctgcaaggcagggctgtgagaggctagccccattgatagacggctcgtagtgcaagatgacttctcgattcccttgcttttgctgctgctgttccggtgaatggcaggtgtgacgaagaatctctgtcgctctttcgttggtggcttgcgttgagttgtagagcctgtgttctggatacgctgcttttgcggcttggtcgtccactgccttggctggggacatggttgtcgacttgatcggggcaatgaggggcttagccccaaatttgttgaaaagtgagccacgaaattggctcgaatcttgcggtccgcgactgctcgtacttgtgggccttggcttcggcgctgatggtgttgatcatggttgctgtgctggttgtagagctgaaagacgttctgcttgcgcgttcattggctgaacgaaccaatgttggtgcaactcgttgggctgcaagttgacgcgagttgtgagagtctggctggtgatcggctgctgcgacttggtatgtgcgatgattgaaagctcaggtattggtggtttgtggcgctgtacacttgatctgttgctcgatggcctcttgataattgctggtaccaccgagctcgctgcgttactatcggctcacgtggtctgagcgattcctcctcaacttgggctgcttgtgatcgtgatggacgttgctgctgcgtctgggcggcgtggttggattgctgtatcgattgcgcgaggtggcgactgcatgctagctgaaaatggcatctgtgccttgggacaaatgatgatccgctgaactttatcattgctgctgacctcggctgctgactgctgagtactcgggcactggggaccggcactagttcgttgtcctggatgggagcacactcggggtcggaattgtaactccgctgacggctgactgcggtgggggtacaattgcgtgggtaccgtgctggtgcttgcacttgtgccgtaatttgctgatagtattctgttggacttgcttggtgagcagcagtaatcgatgactgggccttcttcgggtcgatgaactgacagtggcatccagtgcgtcaggtgcccgaaacttggtgccgctggtgctggaacctgctcatgctgtatgtatcagccgtgctgctgcatgtcgatcgaacttgagtactcgagtactcgaggggtgactcgatgtccaatgtcgatgctgaagcagctcctgctgttgtatcggctgcagcagcctggccatgtcgataatgctgataagtcctggcgcggccatgccgcgctgccccggagcgtttgttgggcttcggacgccactcggtactggtgtcgcattgttattgtggccgaatactgtacttggtatttgcaacgtaatcctggctctgtatcgatgctgctgtactcggtgtcttgagctgttgctgagagctaaacgcgacgtctgttccgagctgatgccgcccaactcgttgtctgcgccaatgtgtttgctggctgctgcattcggtgtccctacctctgcattgctcaccgctgttcttggcgtttctaccaaggagttgctgattgctgcacccgggctgctgttgtactcgctgtctgtgccgagtagttgctgactcctgtactcggtgcttgtatcgagccgttgctgttgctgttcatacgcgtggttggtaccagtgcgttgctgacactgtcagcctgacagtactcggtctctgtactgaatgttgcacctgtaacacaggtcctggatctgtaccaagtgctagtgctgcctggcgcactcggtgtctgtaccgagttattgttgcctgctgtacttggtgtttgtatcgaggggctgctgcttcgtggctgtaccgaatagttgctgacttcttgaactcgatgtcggtaccgagtcgctgctggctgcctgtagtaggtttcggaacactacgagggaagctggcgctaccgggcaaaccaaagctctgttgatggtttagatgtaaatctcaaagtgatctctgtctgtctctgctcctagctgtcggcggcttcatgccggcgactcctgctagcgccttctgccagcgtcttctaccaaaccgacctctctgtcggtcgcattggtttcgctgttctcccctatcctaatgccagcttggtggcgtcgttctgtagacgtcacccgatgagtgggctgggcttgcttctatgaaacccgccactacaccgcccttccaagccttgcccagccaatcgggtcaagttgtcctgctcgttctgttgagctcaactcaaatccgtttgagtgtcaaagtgtcaaatgtcaaaaatacatgtcaataatgtttgtcgaaaatgttgtcgaaattatcgaaaattctcgttctgtcgaaaattgagacttcaggttttgcttgcgtcgtactgcgaacgaggtgcatggaacatgtcgatgggtcggtgagcatcggctgttacgcctcggagcgctgcttggtcagtgcaaggacgtggcgttcgaaacgagtatcaccacatcgttctgcgaactgtcgtagcaacgcgggtacatccttagctagggacttggccgtctcgttggagtcctcaataggctctaggcccttccagcccactagcacgtcgtagtccttcttagcgctgttccatgtgtagtccagtagttcattgatcgccaggatttggccttgggccgctacatgctcacggatctcttctgtgatctgcaacgagctgtcagcatataaccgggagctgtggacgtctgtctcctccccggtgacgagatgccgcaccgtgaacgagtgcgagtctgctcgtgtgatttgatatgtcactagtagcttgtcttggtgtttactgtccaccctcgaccttaaaacgtaatcacccacgtcgaagttgggcttcttcgcgtgctggtggcgcctttggttgcgctcggtctgctgagcgcgtgcgttgatcataggcttgtgcatcgatcgaacgctagctttcagtgccgccagccaaggctcgatgtcgactggttgctctggtagggatagaatcttgcgctgcctcgagtccacacaaaagtccaaaggtgacggcagcggcaacccacagaaaagcttcactggggctctgttacccagagaaggaaccggggtgtgattcagattcccctgtaaaataggcacgaaatatcatgtgtgtcgacttcatattccagacaaagtgctcgcagcacctgtataatatcacaggtggcgcgttcgatgctgccattgattcacggactataagtcaacgtgaattcttgacgtgacttcagtcgccggcacacttctgccacaactgcatttttgaagtgcgacccctggtcgctgatccacaatggcggtatgccatatctgctatgccatgtgaggatggcttccgcagccacagtacttgtaggagttgagcaaggtgttaattcgcaaaaatgcgttgcttcatccttaagtacgagtaggtagttgtcaccggcgaaactctctccaagcgacagaaaatcccagtggagtgctccatttcgctcgttggttctgtatgtttcaccccatggcctttggataatcttgcgcctttcacgtgatagcgtaaaagacaggtcgacaggaattcctccacccgcgctctcaggcggaccaggtaaataaatctcctaatcgactccatagtagcctcccgaccacggtgtccttgcggtccgcaatgggcgacaactaggatgcgttgaataagaccctcgtcttcgtcaggtacccacagtttgccgttaatgcaccgcccttccttctcactgccagtagcccctgctggtcgacacgccttatgtcgattttgcgattggagtatggcgtcgcggtttggccactcgaaatccgggtcgttcaagggccggatgggatgtggtgtagatagtacagtatcggtagttggctgtacttgagatacacgcttgcgtcctcgtcgagttcgttttcgaggtgctgttgtgccggtagctgccgcgggagtacgcttacggagtgtcatctgccgtaggtgagtcgtctgaacgtggttacctgcccaacgggagaccatgtcgctccacacattcgatgttccgtcgatgtgctcaatttcataccggtactcagctagtttcgttgcccacctcagcaatttcccacgaatgtgcttcttaacttctgctccaggtgcaaatacgtagatcacgtttctgtggtcacagaacaacttaaacccacccggtcgtagcaacaggtagctcaacttatcgcaagcgcagacgataggatacgcttctttctcgattatactccaatgacattgcgagccggtgaatgggccgctcaagcaggtcaatagttgatgttgctgctggtgcacgggctcgccagccttccaatccagcccttgtgttactaccaggctccacccgatgttgctcgcgtcggtcatcacacacatagttgcggtctcgcgaggaaatgcgagcgtcacactatttgcaagtagtagtttcaatttatcgtaggccttccgctgttcagcagtcaaactgattgcaattccagctgcaacccgtttggttcgctttgatgcactcgccaaaactgcatctaatgcatcctgcaaaggccgagtcgttctcgcgtagtctattaggctctcccgcatccaattggttgcgcacaagaattgctgtaattcgcccgccgtgcttgggtagggttggtctcggagggcacggatgcgctctgggtcacgaatgacgcacaccggagcctgatatgaccttcccacaccagcggacttcctttttgaagagccgagacttcttaacactgagcttgaagccgaaaaaatcgagtagttcaaacaatctttccaacttgactaggtatgtctgcacatcattcgcaaacagtagcaagtcatctatccacacaagtaaatggcgccgcaaaagctcctccaaacacttctcgattgtagcttggaaaaacagcgcagcatcagtacatccttggggacgcgtcttggcgtgtacaccttctgatgagtcatgtaagacaacatctcttggcattcctctgcgagcgcgatctgccaatatcatttaatgaaatcgaataagccaaagaaattggcccctttgatggcttccaggtctgtctgcaagtcgggcatgatccctacgatcgcttccaccagctcattcataggtttgtagtctgccgtttggcggaattctccacctcccttccgaactggtagagcggggcacgtccgtctgctctctcggttttcgtacacccaccctaacttcaccaacttgttgttgaagtcctccatgaagcgacgaacttcaggtgggtacttcctcgccttacatctgtacggttttgcaccaggcattaggcggatacgcattggcggcactttagcaggaggatccgcacccaagcgaactcgaaacaggtcgaagcgcaatgcgagtgagctccttcttaaactcacgcgtgaagtgccttaggtgctggctggagcaactggtgtgactggtggttgagatgtgtacatgaatattggtacgcttcatttgcgctcgaagcaatttgtggagacgtcaaattcgtctccacaaattacgacggatatgctacgagaaatacgacatatatgtgaccgtagcaattatcaagtttgcgtgggttttggtagagctccagtgcaacaacccgtaaaaacaaaacacaaaataggctgaacacaaagttattaaaggtgacaccccctctcgtgttgatgttaacctaaacgtctcgcataatcggagcctcatcttcttgtacttcgccaactcgaaaccagtccgcactatctcgcggaccaattgggataatgcctttttaccagtgtaaaaactagtgtaccgtctttgttttatatttattatctattttttacgagtgtagcattggatccgtgttttacggtagtacatattcctagtatgcaacatgtattatcaattggggacgaagtccccatttataatcatctatcgctcctctttactctacagtatttcttacctctctttatttactaagtacccctctaaatctgagacatgaacggttagggtttacatatggaatcgcttcgccggggccaaaaattgcgcgaaaaacctcagtagaagaaccctctctagatccatagaaggggtctactgcgtaaaaactggagtgacttcttctgagaagcggtcgatgccattaaagtgggaggaaacgatttagcctcgacaataaacgctacttaaaatcaaacagccggctgttggtcgcacaagttgtgtttttcttaaataggatccctcattttatgttttggcgctccttattaatcgtttctccgatgcatcagctttaaaaagctttaaaaagctgatgcatcggagaaacgattaatatagtagcatatcgctgcgattctaacccctgaaaaataccttaaagtttgtatggtgcttccggccaataggagtgtgtcgtctgcgattcttagcatttacaaccaatagacactaccgttgcttaaattttcgaccaattaaatcgagggaatgactgtcaaccgctgatctgagcattccaacgatatctggtcggaaacgcgatttgatatcgagcatgccatacaaatatcaagtgaactacaaatagaataaatattcataggtttccaacccctgccagatcatctccgactccattctgcgttccgacgcacacaggcatgtcggtggcatcgctagttcctgcgaacagccagagaagcagagcgacggctgtgaagtccttcgaagacttccttgcgaagaaggaggtgacgctcacagaagtgcatgatcgtatttctaaggacagcacaggtaagagtttgtttgtcattctggatacgtatgggtggttcttagtgaaaaaaagtaggaaggcaaggagtagctctgtccaagaacactgtgctatcttattttggcaatgttaagaactggctggcggatctgtacccgcaacagggccaatgtgtagctaagaagctgcaaaagatgctatcaactctagatcggtactgtgaaaaggggccggagcaaggtgtcacgaaacaagcgccaccatgtactaagaaagatataaagactatcatctcggctctctacatgcacgcttccgccaactccgactacctggatgcggcgctagtggcgttgatgtggtacctctacggtcgtggttctgaggctgagcaattggagaaagcccagctgtgtgtataccccggtacgaatcgtgcaggattttgaatttttgtattaattaaccccacgattcatgctgacaattctgtgcgtatatgctaggcggtgtgatatttctccgctttaagcgtatgaagactgcttcgcaacagggaatatccctgtttaaggatcctaacgatcccttcacgtgcccgttacacgtgctagctgtcgctctcgcccttcaacccgctccaggaactcgcatcttcccgcaatttgctgccgtacctgcgctgtccgcgtccgacgaccaagacgacgatggcgagctggggctgattgcgcagctagaccgcgagcttgcggaagcacctacatgcaagactccacagccatgtcgagccaactcggcccctggtgcccaagcttatatcactagactattagtcacggttagtgggctgccaacagcaaaggagagtggactcacgaagggacttacctcgcactccttcagaagaggtggagccaagcacgccaacgccgacagtcgcattagcccgaactgggttgttgaacgcgggggctggaatatgtcgcgcgtgagcaaggcgttttcctacatgctgaacacaacacacgaagatcaacaagttgcgcgtcaattgagcgggcgaccgacttccagaccttacctccctggacggagtcgtctgagcgcgcgtggagaagctgcagaatctcctcttcgctgctgtcactggtttctcgacagtgtcttggaacttggatcctcaggtgctcgaagtgttgatggcgaccttgatccttcacttccccgagatggaacgtcatcgcttggatagcctgtacgcccgtcgcattcatgaagcccttggtgtcctcaacatacaggcctccgagctgttggcatggtcgatcaccctccgagctgcattcaatccatctgcagaagagaaacaagaaacagtggccgagtcctctcaaaacatgttccgtgttctcgaaaagctgtcgcagcagctcaacgagctattgctccgccaaacacgcgtagaggaaaggctggctgttttgggggcgaacgcagaatttattgacaagaaaacaaacactaccgagcagcagcacgaagacgttgagcagtcgcagccaaagcgcgcgcgcaaacgtgcctccaaagcgctatcaacagtgtggttcgagtggttcactgctgtaccacgcatgtacgaatcaacaacagttagcaaagccatccttcacgagtcacgacacgctgttgcgttcatgatgctctgcttaccttctgggttcaagctggacccggcctcgccagcgtacaaggcggaggtccacgctgttggagtcgaagccgagaagaagacgcttgaatacttggctgcacaaggctcacaggctgtagccgttggctcggtcgtcaaagccatgcgtgcgcttcacaatgcagaccacctttccgtcctccttgaccagtttcgcgagcgctactatgaaggcgaagtcgtcgacccgacacccaattccgcccttccgccattcctgcgcttcacctaaatgcacacgcagcacactaaacagtcaataagatacacaatacgtacaacaggagtagcacgcactctcttagctgacctgcccaaaaagaaagcaaaacacataatactttatgcccatgtcggggtttgaacccgatcctccaggcccgaaggcctggcgctcaacctcacgagctccatgggcgcgggtaagttgcatccatcaacagcaccatactcgtccaaaccctcggtcacttgagccacacgccacgagagcgcacaggcgcaacccaattcacgtcccagtagcgcacataacccagcagcaagtggcccggcgtcagtagcacacacggcccagcagcacacagggcccagcagcacaggcggcccagcagcacaggcggcactgcagcacagacggcccagcagcaagcggcccagcagcacacacggcccagcggccagcagcgcctgtgtacacgcagagacaacagcagcacagtcagcacaggtagcacaagcagcgttgcacgactcgctgcactaacctggaagcttctggactgttggccgagaatccaatcagcggccgtgaagttaaatatcagctgaacaaaaaacctaataccgttgctagaccgattttggttggaagcagtccgaccccgttggaattttgacggtatggtgatctgtcattaccaatactaagcttactaatagttagctatagttagttgaggccagcgtatccccacgctcgcggtggcaaaaaagcatcgttcaagctgacatcacaatcgtcgtctattataaaagggcgcgtcttcccaacatttgtcgtgtgcgagtaaacgtctctaataatagcagattacgccgccccggatgctcaggggcacatgaagcaatcatgaagaagcgactttatatcacgatagcgtacgtcagacgaccgcccctatccgcaagctttaaacgcgctacgttaaaagccagagctattcgaccaaaacacggctttacatgtagcactaacctcacaatagaggagtaatcagtgctgtagctctgcgtcgtccttattgcacggcaggcccatataattttgtggtctagtctttcctggagaaaattttaatactatttcgcaattcaccacccaggaggcgtcagcggcttggacattaatgttatgggccctactcgtcgggacgctcattgtcctgctaacaacaacaactctgtcaaactcgtaatgctgaatgccacggagtcgccgacatccgtcgcacagcaacaacaagcgacacttggctggcatcaccagctcccagcgacccaataccattgacgaagagcgcggcacaactcctaccgggatctcagcgttggtcggcacattgaagaataacgtcggcaaactgaagctgcgctaccagggctggcagaagatcaagttcatgaagaagatggaaaggttgttcgaaaaaggcgcaacacccgaaacactggcaaagaagttcggatcaacgaagaaactacaactccaagaagattttaggcaattctacaagtggaggacgagctggggggtgtggtcaccagtatgcaaaggaaagtaaaatgaattctgatgttagctccaactctaaactagtgcttgttcctgctcctggcttttgcctacgaattcgtacagcttctcgaatccggcttctagtactctaagcaccagagcgagctttgcttcggatcgtacaacatgcactgcggcagacacgagaccggccagggctggccacacagcctccccagggcctgccgctcttgaaatatgcaatgccacttggtcatgatgttgcgagtgcgtttaagcttcatccagctgtgccttgaactcctcgtcctgttgctgttctgtgtagttggccaccagcactggcacgtcgcgcagcatggtctgcagtggctcccatgagtcctcgatgtcttgcaggtactagtacctcccattgttgcgttgccgagttgtagcggtggtcgcggaaacactccactcctggcacgatgccttgcttggcaacgtgctcgaggatctcttcatcgatgttcatgcttgcgtcgtcgtagtacttgagcctggaaccatgaacctcaaaggtgtcaccagtaaggagatgctccaccatgaacgagtattcgcgagcttctgtcacgcggtaagggcccacccagcgtaccatcaatttgttgccgcgtagacgctcgtcgacacgagaccaaagtacatagtctccaacgctgaagttctcgagtttcccctccttagccattttctgatacatacgggtcttctcctttcgatccacaacctcttgatgcatcgagtgtaggctctcacgcagcacctctaactcctcctccactgtgtccatgttaatcttcatcaacttgtccttggtctgcaacgtgcgggggagcagcaccgtgtccagctgcgtcggcacttggaggcctgtgaagagctctaggggtgcattgccaccaagcgagttcacgggtgtttggttcagtttggcctgcacgagaggcaccaaatgctcccagctcttggtgtcgagctggtattccaatagcagcgctctcaccacctggagcacgtctcggttgaggcgctcaacagtgccgctcacccacggagtgtagacgggcacgaatgtgtgcagcgccctcaatcgttcccccagattctccatcaactcgttcttgaaatgggtgccattgtccgagacccacattgccggcagtccgaatcgtttagcccaatccagtatagccgccacagtcaccgtgcttgtaggcgaatcactcggcactaactcacagtagtgcgtcagttcatccttcagttccagcaaatagcgcatgcttccgtacgagtctcccataaacagaaaatcgaagtgcagtacctcgttgcgtccggcaggctcggggtgatcgctccatggacgctggataagctggctgcccttgatgtgcttacagagcaagcagtctgcgacgaattccctgaccaactttccaatggacttaattcagtactacgcctgcatctggcgcagcatgacgtcggctccccggtgagcgttcaaaccgcagtgagccacgatgagaatgcgcgtgatcagatccttggccggcgtcgggatccacaccttccactccacctgaaggagctcagagtccggtgcggccgacgcagttgccgtcgacggcgctgagcggcggtggcgttgctgcgcctctacgacttgatcaacagacggccacacgaaagcttcgtcactaagcgggcgaaggcgcgagagctcacgggacgaccgagtccgcacagccttgacagacacttaagaggtgtcggcgggagccaaccagcgcgacactaaatccgcccaaacgttctcagagcccttgacatgttcgatttcatagcggtagtccgacagcatcagggcccactgctgcaactttccgcgcacatgcttgcgaacctccgtgtggggcagaagatctgaatgagatttgcgtggtcgcaaaataatttgaaccctgcttcgcggtgcagcagatactccaggtccttcgcagccttgataatgggatcacgattagtgttgtttcttaccaagttaataactcttaataactggtattagtaattttaggcatttaataacgatggtattacctttgtgtatcatttgtgtatcgtaatacttaaatattgtcttagcattttaacttctggaagagcaagcttttgctcatatcagcttcccacacaatgctagcctgcacgcgcgcggtgcgttctccggtcccaggctggaatctctcccctagatctacgcgtcgcttggcaccagctcgttgctcggccaggacgtgaacggcgccggcgccacgctggccacggggctcgcaaaaataggcaggcccaaggtgctctacgacgcgtacatcgccccacattcaagctgatcagcaacggttccgcaacgcagtagtcaaacgcccgctgaatgtcatcaaggaagccatcgtgtacctgcacttctgcttttcggcccgagacgatggactgcgacaaggccactcagactgcttacagaagatctcttcacgcgccatgctagtggaccgaaaccatgactctcggcctggccctcgcggaccccatgtatacgtcggcgggcgacctgcaggccgacggctcgttcaccaaggacctgcgcttcttcagtggccagaagtcagccatgcacgcgctccgtgccgccggtgtgggcgtctacatcatcggcgcgtcacccgagttgtacaccattccaaccagttgcttcggactaggcgacatggtgcccaaggagaacaggtgcgacgtgcgcttcacgacggacgaggccgatgcttcactgctgaacgacaggacctgcgagttctttggcactacggagtccggcaccaacaacacctatctcctgcagggcgggcctagccatcagtacgtggaccacgtcacgtgcctgctggccgagggattcatcaaaaatgaagtaagtgccggtgggagagcgtgtagctggatatggtcgatctcatgagtttgtgtgttgtgctgcagattcgtaagagagggaagggcttgaagagtatcatatacatcgccgaggtggccattatgctgttacatgaacgaacagctcgctgataagggttggacgaggcctaaatgttgcgctacaagcgttgatgttacattattactgcattcttaaccaaatatgacgcttctttatttgtgggagtgctagtgcgcgttctgctgtgccaatgtgcgccgttgcgctggcagctcagtgacagaagttcaagttaaggtcatctcgtagaagggcaacctgtttcggcgggtacggcacgatgcactgtatatgtgagctaactgatgtgaagctctacgattataagaagagcaagaagagctggcgtttgcattatttgaactcggattagtcagggcaaaagcggtttagccctccacctctccttcacccctagcaagttcgccaccactaaggtcaccaaagtgttctgcgaccgccatggccacgggtccacacgcagcttcaccacgcacaagcacagaaaggttgtgtgcgcgctgaaacagggtggtgaggccggcaagagcaaatcgaacatcctcggctgcgtgcatgagtgatcaaggctcgagtagcgcgacgacgaatataccgtcacgtccggcaagcaccatcaagtctacccctatcatgaacaactacccaagtccgcagcagaaccaaaactcctcacgagaaaatgaagcggaggaagctgctagaaataccatcagccgaggcagcatctagaagaaattcgaaagaggttgaagccaatgcattgacacacatttgcatggggacgacgactctattgactaactagtgcatgatatgtaatcaagaacgcgtgaacggaatgaaaatatggatcgtgttgcgggcttagctagcgtgaacaaagtcaaatatgctaatgctcccaggttggaccaaacagcaccctcggcgagtggtgggtgcgtccagtgctcgactgtggagttggaggtagtccacgacggccactgctaccccctgaaaatacgagacgatcgctagttggtagactcggtgttgttgcacttgccgatccgggcggcctcacgaccggtggcacaagctggcgctcatcagcacgcgtgaaaacggttccgctgcttgttgactgcgtaagtgcgactgactgcgtaggagcgaccgactgcgtaagagcgaccgactgcgtaagagcgaccgactgcgtaagagcgaccgactgcgtaagagcgaccgactgcgtaagagcgaccgcagcctcgtcactgcatactgtgctggtattcgtcgcttggtcgggtagcgggttggctagtgcagacgaaaatagtgttcttcgagctagcgggggtggacagcttcacgttggtcggtctgcgagggcgtgaagaatcgtgatcggtgcgccgtattagaccgactaccgcgcatgcgactggagctgttgggagcaattggcgtaacgatgtcatcatcgctgtagtcgtcactcgcgctgcttttgccctcttcttctgcattgacttgatagtgcactgcactagttgcagccttgtcacccgcattcgagtacaaatatgctagcttttccacgcgatcgggtttcagccgatttcgtcgcttggtgcggatgaagtagtgaacactccacgagcgctcactcgcagcggacgacgtcgggatgctcaaaacgcgggtagccaaagtatgtaggagcagaaacttgttaaccttgaccagccaccagtctaatagcgtgtccctcgcgtttttttcgtggtcttcggctgtccaggacttattcacgcgaataaaagccatgacaactcggcgaaccgcatttggagatacgttggagggtagaccaactcgtgtagctagatctacgcatgcatagactgcattgtccaaatcatcaccttcaaagtcgtccgtagacttagttgggtccagtaaaaatgcagcgaggattgattcgcgcttgagggtgttccagcgggagctaatctggcctcggatcgtgttaagaataccagaagcaacatcatcagtttcgcggttgtagatgacgtgggttttcagtccacgaaagtattcatacaccatcgaaaggcaacacccatccttttcgagagcgccgagagcttggattatcgggttcaccagtcacattacggctctggcattcacccaaaacatgctatcagccaaaatggactcgacgcgattgagtttggcagcagcatctccgtaacgagccagaaattcatggttggaaaacaactcacgcagcacatcttcgttcctcacgacactggaaatacaatttgtgctcgagtaccaccgcgtcgaaacagggatgattagcgcgcgctcgacgcggtggtactcgagcacaaattgtatttccagtgctgccgggtaccaaaatacttgcgttgcagagcccgaaagcgataaagaagcgctgcacgtttacgcacaaatttggtaactaggacggctttcttgaagacgtcactcatgaactccatcccgaacatgtctttgagtagaagattgatcgtgtgtgccgcgcagccgttacacgttagacttggtatcttggccattagaagctcccatgacttacgcctgttagacgcgttgtccgtcacaacagcgcataccgatccttttccgacgacattttcaacagcttgaatcacctttttcaactctgacgccatgaactcccctgtatgctgtttgtcggcgcagcgctccgatgaccaaaatatgggtcggataaatggagacgtcaccataaagttgataatggactcgctgttgggatcggaccatccgtcgcatacaatggcaacgtactgctggtccctcagcacctccataacgctggcaacttcctccgcgtacgcgctgtcaagcagtgaggtcgccaaatcttggcgtgaagggagcgtcattccgggccggtacttcgtcaggatacacctcatggctccattttcgatgactcgaaatggaatgccgcaggcatagaacgctttggcaatctgaagatggaactccttcttttcagtcactgagaccggtcctagcacactcgtagccatttcaggccgtgaacgcttggatggactgtggggcctatcggaagtgttgggacgatctcgcttggagggtgttacagggtaattagcccggacgtccgctggggcgcagggacagctgcgaatgtgtgggcggaggtttttcttgggctgggcattcttgatgagcttggagcagtgtctgcacgtcacgtcgcagtgctgcttcttcgggttggcccaacgtggcacaaccacaatgtacttggtccacacgccaactgaagggcgaccaaggccagaccttcactgctagcccggtccccgttgcggtggccattttggtccatggaacttgcaggctctacaggagcaagtttgcgaatgcagcgacgagaataggccccgtgcgcgagctgcctgccacgtggagcatacgcagattcttgtcggtagacctccacgtacgttgacaacttcacgaaacgcgttgaccgaatatttctgccacagcaactatacatatgaggtattaccgttagcagatcgtatatttctgccacaccaactatacataaaagttattaacgttaataaatggtaagtacgaaggtaatgacggtaactggtaataactggataaggatttgaccaactctaatcacgatagattcacgcaaccaattagctgcgcaaagcagcttctgcaaatctgccgctgtggctggaagcggcagtgaacacagagctgcaactcgttcggggtcgtggcgaacgccctcaccgtcaatgaggcgtccgcaccaggagatctcacgcgcgaagagacagctcttgttggcattgagcttcagaccatactcgcggaggcgagcgaagaatttcttgagcaccgcgatgaactcctccgcagtcttagcgaacacgacgatatcgtccacccagatcaacacgttttcgtacagcatctcgcgaaacacctcctgcatttggttttggaaatggatcggcgagtcggttgctccttgtggcacccgcgtgggtgtgtacacagtgtcattcgtgatgaagctgaaatattcacggcagtccgggtgcagcaaaagctgccagaaccccttgaagagatcgaacgttgcgaaaaagcatgcacccttaaccttggcaatcaccaccagtaggtttggcattgcacctgcgataggtacggtgcgcttgttgatcgggcggtagtcggtggcgcaccgaaagtcttcgacgggacccttcttgcgaacgggaatggccgcacaagcccacctacactgattgttacgtacaaccagctcaaattcttccagctgcctgccgtagtcccgaaggaacttggttttcagctcagagtactggcgaggcttcgttcgatacggtgtggagccgtcgaccaatacgactcgcagtggctcgagcttggcgggtgggtctgcgcctagcttcgtccgccatagatcaacttcttccttggtgacatctcgcagcgcatccttaaatttgtgtggaaacccggccttgacagcgtcgtccaacattacgtcgagtcggtccatgatttcatccaggttggtcgcgcccacgatgtcatcctccggtataccatcctcgtcctcctcgggggcacctttggctgcgaggcgctcaacgctgatcccaagcgacttcagaggtcgatcaccaagtaagaactcatccgcatctccatcgatcactacacactgtaatctgcgcagattgaccggaccggcagccgttaatagctgcacgtcaacttcacacatctcggtccaaggaacgagccgtccgtctgccacttcaacctccatcggcacattgagctcttccaccacgaggtcatcatccaggttcctcagttcatgcgcaatgtggcgggtaatcacgtcgtagtcagcgccagtgtcggctcggaaaggcacctccaatatgccattccaaatggctgcacgctcaccgggctgcccaattgatcgcacagtcttcgcacgcaagcgctggttcttcatgtcattcattcgttttagggctgcttctttgtctgcctcactagcggtggggcaatccttcacccaatgtgctccattgcacacgagacagccatcgcgcagcggtgcgcggggcttgtcggcttcttgcttcgactgcttgggcttgcttgatgacgagtgctggggctgtgaaacacgaggcttcaacgaaagcgctggcttcttgttggagtgattggtcttggggttgctacgaggtttatccacctgcttgagctcctgggccagcatgtggtagtgctgctgctctcgtgcgcgctccactaaggcctcgtagagcgcaatatcatccttcttgagcactggcttggtgatgaccaggcgctccatctcccggaggagaatttcatcacggagaaatcgattcagggcgcaatgttctttagcaggtacttgcaacgcaacttcatgcgttcgtcgtaattcggttcattttcgcgtccactaccgaggattccacccaaaccatggtcctccacaatcttgtcaaacagcacgaagtaatttaccacacgagcttcggtgtcttcaatcttaaggtccatcttcagttcttccttgaaaagctgctccatgtccgggatgtggctcataaaaccatttccaaatctacggtctcaaacccaagaaaacagggccataagaacgcaccggtgagcgattgggaggcgtagttcttcttgacataaatttcaggaaatggtactagcacaaacataggatctagtcattgctacaccgcaagacctaatcgcgtggctcaaccaccagattgttggagaagcgataatatcgctattatcacgcgataatttattgagtatgcttttctttttttacggttacctgaagtcaacgtctgcggtctcgacactgactgctcggttcggcgatactgctgtgtacatgtgcaacataattaaacttgcagtcgtaaacgaaaactcaaaagtcccgaggctaccgaagaaggtgatggttcactggttgatccctcgatgtgaaggacgaaatgacaaagttttggctaagcggtcgggaaacgccgaatcaagctctggaaagtatcggattgtcgtttttacagtgttatttttatttgtacttatatattttgctttgcagttattttgccgaccattttagacgctaaatatggcaaagcctgctcctaaatatgtgtgaaagaagatacacgacctgctaaaattatgcataaatccacctcctcatatatatatatatcgacttgggagggcctgtcagcagccatgcattggcccagtacaccaccgtccatgatccccagcatatccaccctcttatgcataattgccgtgtgtgaaggtgcttgtggataaaaaccgacagaattgtggcgcttttagcgtaattctaggcctccacccatttatgcacctcgatttatcgtaaatctagcaggtggtcgctataaatacagcaaatctcgcctcatattgccaaaagcattgcaaatcacaatatagctattgtgcttagcacgaactttggcatgcgattaaggaacgagcaaatccttcccggtgatcatatctcgcagcctaactctaagttaaagttaaggtaatcaaccgccagtaccaagcacaacgcagagcaagaacggagcggttgccactgcaagaataaatcggttctcgctgcaagaaaacaaactgataaggtccccgatagaatggcgccaactccttgcataatagtaagcacggggacgttttcttcttcgctctcttcgtcgtggcggtgcgcgttaaaccaagctcgaatttcagagcacggcatatagtagcagtagaaaatttctactagaaatgtttggatgtgcaggaaacgctgactttaaagctgcttgcagctactcgatataaaaacagggatgttcttcaatattgtagacgtagtttagtacgatagatcgccaacgcatgtcaatcatcgactagaaagcaatcagacaaagagagcgagttagaattagaatgtcagggccgtagtattgtcggatttactccggccattcaacgaaagtgagcataactcaaggttagctcgttgtcttagcagctattctatcttaaatcgacgagttagcctcctaactcaatgatgggctaatcaccgtgatttgctaaaacaacgaattacgccgttgttaagacagaaagcatgcaaggcacaatagatgttaatgtgttaattcaggtagtacgtggacgcttacaactccaagtatccctcatgagaacacgacagtgatcgagtctttgacgcgggtcaccgctgtgaagctgcaattggtattattttaccctcgtgtcattcctcggtggtttccacgtcctggcccaagactggaagagcttcaacgcacactagatgaaggcaacaagtagcatccatcgtgcagctactagagaaactcacgttcgcttcgttttaacaaaagtaaatacacacaaacgtcaacttggctggtggaaaaatctcccttgtggttttgtcatgttgagaaaccaaaaaatcacttccaacactacaatttcaccctaacgaagtctcccttcaacaccaaaacgacaccacagtctgtcgcttagttgcccacggcccagacgcgcacaatgccgtccgtgtagcccgagaagagcaccgtgccgtcggccgaccaggccagcgagatgcagtgcgggggctgagcgtacttgcccttgggctcctccacctcgggctgcaggtcgtgcaccacgatcttggactcgaggtcccagatcttgatgcccgaggtcgtggcagcgcacagccagtagcggttgggcgagaacacgagcgcgtggatgacgtcgccggccaccagcgagtagaggcgcttgccctcgttcaggtcccagaggttggcggtgccgtccttgccgcccgaggcgcagatcgatccatccggggacacggtcaccgtgttgaggtagccctcgtggccgaacaggttggtgcggagcttgcagttggacaggttccagatcttgaccaccttgtcccagccgcacgacacgatcagcgggttggccgtcgagggcgagaagcgcacgcacgagacccactccgtgtggccgtcctccgtgatggtgtacttgcactcgcccagggtgttccagagcttcacggtcttgtcgcgcgagcccgacacgatctggcggttgtcggcgctgaaggccaccgacagcacgtccttggtgtgtcccacgaagcggcgcgtcgtgatgcccgtgttcaggtcccacagacgcagcgtgccgtcccacgagccggacagggcgaactggccgtccgacgagatcaccacgtcctccacgtagtgcgagtggccctgcaggcggcgacgcgcgaagccgtactcctcgccgtcgttcgagagctgccacaccagcagcgacttgtcgcgcgaggccgtcagcagcaggttcgggttctcgcgggtcgtggcgagggccgtcacggccttgccgttgtggccgtcaagctcggcgcgcgggtagatgctggtctcggccatggtgtctgtgaggaggttttccaaagtgaggggatggagagctcctttatcagggagggggagaccggaggaccagttatcttttgagagacggggattgaaggaaattcggacacgagtttcgacaaatgagaggagagtattagatttggaagggggatgtgtagccatgaaggaaatgtagccatgttgacgacttgacttcaaagtgctaccggtagtcgtgtagcttgcgcttcacctcttcccgtctcacctcgaagtagaagctggcgaagaacaacacgagcgcggaaactacgaggtgtagcgtgagagcggcgaaagccagctctagcgacagccagccactcgtcggtacgcacagccacacggcgctggcagtgaactgtagaccacaatccaatgccctctccgacagacctgcagcattcataccccgtcgtaagttgcgcctaattctacagtgtgagaataaagttcgccaacataccgcgatattcccgcagcttgcgcatcaagtaagccgtacgcagaagcgtcttaacgttatcggggacgaggacgaggacgtccactcgatcactggattgttcggtacgctgctggctgccaatgtggtccgatgggttcatcaggttgcgttgtgtcaggaccgacgacaggaacatcgggatttctcctcgttgcaggtgccgcaccgcggtcgggctaaggcagttgccgtctatcctagctaggtagagcttcatagcgcacggatcgagctcctggtagcatttccttagaatgctttcgtgtaagacctctcgtagtgcggcaacgtctccacagacgtcaacggtgagcacacagcccgcgccaacgacgacgcactcgagtgtaaccatcctggaaagttgagaagtgagaggacgaaaggattttttgatattgtccagtggtcattgattggtgttccatccacatggggtgctttgagacacaatggaatcctatcatggtgttactaatctaccgccgtttgagcctccaagacgatgcctggctcgaatcacgcaattgtgcttcatcaccactgcgagtgctatcgacagcagtacctgtagcttcatgtgtcactccttccagagcgatatgccgtggcttgcagaataagatccagcgttgatgttagttatggtgactatccacaattcttgtacttcagtgatggaaactaacgctattacagaatttgtttaaattgtattgcagcttgaccatcagtagatcggagaaatggaaagattaagcaaacccatttcttggggagagttgtgagtttctccccgtagggtggggagagtggatgctacttctcggtatcatctagcatgcgtcgaagttttttccgtcttgcagaagaggaccaggaagtggaaaccgccgaggaacgacacgaaggtaaaaaatgccaactgcagcttcatagcggcccccaactcgcgccattcgttggcacgcaccaccaggcgatacacatacctgcgaatgtagaccccacatcaacatctgaccagagaaattcacacacagttagcaacaatcctcttggtggagaaatgcaccgggggtattctacgcaccgcgatattcctccatctcgcgcctgatagataccgctcacagaagcgtcttaacgttatcggggatgatgacgaggacgtccaccagatcgacttgatttccggttcgcagttggtacttcgtgctgccgattgggtccagtgcatccggtagcgtcgtgtctggattgaagtcatgaacgtcgggatttctccttgtttcagctgcgtcgcatcggccgagttgagccactcgccgtctcgtttcgcgacgaagagcctcagagcgcagggatcaaactgctggttgcatctcttcacaatcgatttgtgcacgatttctcgtagagcagcaacgtctccggagactgggacagtgaaagtgcagccaacaccaacgacgaggcatttaagtgcaaccatcttggaagattgagaaatgtgagcagctgaggaaaggagttatctcacgggtggttggtggattccttatgcttcaatcaaagcaatagcgtaaccttcatgatcagttagagccctctcttaccttaaatctaaatgcatctccagttgagaaagcgccgatctactgcacaagtttgttcctttgccattcagatctgcttctcgcggatccaagcaaatttaaacgtgaaatcgacccctgataccacgtgtacagaccccatgagctattgaatgcaattacagagccagataacacttaccgaagtgtacgacgcggaatcccatcgtcaaaagcgcccacgtgatcaatttgtcttggatcagcatcgtttgcgtctccaagacgaacgccaggtggtaaaatgcttttacaccgcaatttcgctgcataacgactgcgagtacgatgaacgacagtagttccagcactgcaagaacaaatacgctatgcacggtggccgtggcattctcacgcgtgatcccttcgatatccaggtgatatttcgcgttcgggagtcgaacaatcatcagcacaaagcagccatagagaacagggataatcgactccaagtattccgtgagaacgtggcactcggaagtaaacatggtttcaagcgtctcctgaagaataaaagacttgcgctcagctgaatagtacctttgtgtttctctccgcacacggttttcgacagctttcataggtacaacggggtgaactctggccagccccttagtgtgtacgacgaatacatctggcttggacggatgcgcggcgtgcgatctgtgcctaccggaaggtgaagacttgacattatcgagcatgcttagtagctgttgagtcgcgtctgatagtcggtacggaaaactcgaacgcagctgaattcccacccgcatttgtctcgcgtaaacttccggcttttgacagagtaaaacaatcgatgagagcaaattatcactatcggactcgccgacaacctcgcgaaggcgtctttggatgctgctagtgcgtctgaagtggccgtacagtccaaacatcacgtgaaacatatcgagcgcgacaaaagtgactattgtagtcgtcgaggtcgcctgctgcatgctggttgcgaggtacagggcgttgaagaaatcgactgtaaaaatgacactctcaggcgtcaagtcctccatgtgcgttgtcatgcgcagaagtaggtacttgatcagcgacttgatcaccggcaacagcaatattacgagtagttcgtggtttgtttctgcggcaatggagaatagcgcttgatatgccgggtacacgatgatcaggagaacctgggtgcaaatatacttgacaaagcggaccgtttgatccaagtccgccgctgcatcttggaaaaatttcctaccagctactacgcgaaatgaaatgatcagcagcacgtagaatactggaaaagtcgataccacggtaaaaggaatagggaaaactgtccccgacgcgacgtgcatcatcagaatcgggaagcttgagccaacgcagcaggcgatcgccacgcgttgaccctgcgagatgttgacttgatcgacgagatgatgcagctgaacggctgcagcgtgggcgatggctgcagtcaagatgctagctcgaatccaaaagccgtaatttgctagtgaaccactgttcggatcttgcagaggcactagttcttgtgccaccacgagagtcatcgtaggcaatggagtgcccaaacaaacaaaaattgcgcgacacagagacgtggtccgagtgtattcctcgagtgccagtagccgctccagcgagtatttgccgccgcgatggctcacctgcagcctgggccataagcggatcaccttttccacccaggaggtggtccattgcaagcaagcgctaagtaccttacgctggcgattggaagacatgcttttcgtaagtctccaggagaaccctcgctgatctctaaatagctctgaaatgctgaataaagtaatgagaagttttgataatcatagcacggtcaatctgggagttaggtggcgtggagacatacaacgtgacatctctatttccccattgaactctcgattcacgccactgtgacaaaacgccatgaaattcttctacaatgctgaggacccgcagtgagaagcaccatcaatcctgagcggttggtacctacggccgagtaaaatctactgacgggtacgctcccgggcgacgcatgtcgaggatggggctcgacatgctgaattacgggtgaagctgagtatgcatgtgtattccaaccggttgtggtttggattgttgaatggcggggaaccggatttgactgcggcgccacaatctcatctcatagtaacctcacattgccacgatccttctcatcgatcaagcaattcgatgtaccaggcgcttaccacattatagtatcttgaagttggatgctccgatacagctaatccagtgaaggtgccaagccgcttgagtcctgtgagtcgaattgagaactgattgattgaatgaagttactcctggcatctcctagcagctagactactcatgtagcgccttgaaggcaccgtgtgtacccaaagcaagggttcaaacgaacccagaacgaaactcagatgaagtcaacccttacgccagggaggacaggcgctagtgtcgacagggtgcagaaggagttgtcattctccctcatgccaggatgtcagtgttgttaaatcaacacgggaagattcgcctgatgttgactcggtactcgcttgatccagtgtcgaggagcacattgccgttgtcgtagacggccttcacgacgaacgggcccttggcgactgggtcggttttcttcctttcacgagcagggacacggagcatgacgttgtcacctacacgatagaagtgctgcagtcgccgcatagtttcacgatcgttgtcctgcatgatggccatgaatcgctgctttgagaggaagttccagttggcgaaatgcaactcgcgcgtgatcatgtcctcgccaaacatcaattgagcgggggaagctcgaagtacggagtgatagctggcccttatggcgtaggcagcatagtcgagggcgacttccagctgatcatgcaggtccgggcgtacgcgaatgatgttcataatttccaagtgcacgcgctcgcagatcgcgttagcctgcgggttctttgcggtgatcggtttgtccttgatcgccatcgaggtcaatagcagctggaactcgtctctcgtgaattcaggtctttggtcatgcacgaccagttttgggcgaggataacggcagagccacacgcgctcaaagctcaaagccgtagttgccgaggtcttgccgcgctgcatcaggacctctaaccagcgaagttgctgttcaatcaccgtcaagcagtagaagtccccagtaaatggccccaccaaattcgcgtgtacgacgtcgaatgggcgatcggtgttggatgcaggagttggtggcaggtatccacactgttgcttcccaccgtgcagctttgccttcttgcagtccacgcaatctttgacgtacttctccaccgctgtctgcattccaggccaccagaatgtgctcatcgactgattatgcttttcagcaccaggatggagcaggtaatcgtggtagagctccacgatactacgacgcagcgtctccggcactacgacacgtttccgatggtgaagtagcacgacgcccagcgcaggacgaagtgaataaccaggacccgcttcatttttctccagtcgtgcaatcactttcttgcaggaagcatcttgaagctggtgcttcttcatgacgacgccatcaattgctacttcttcttcttcaactgcgaaaagttcctcttcggcgatctgcttcacgaagtcgtagcggagtcgggagaacgcgtcagaacccacgttttgcttgcctggaacgtactcaacctgcaagcgatactcttcgaggatcagcttccaacgcttgactcgcagagagttttcgcgtggaaacaggaggttcttgtgatctgtatgcaccaccacaggaaatcccagcaacattgtgcgatattcttttagtatttccacaacggagagcaactcccactccatcgtggaatacttccgctgtgtgtctgtcattgagcgagagaagcacgcgatgatccgcttgccctggaggatgacacctccaatctgctggccgcgaacacgtgaaaaggacggctgtaatcaggaaatgctagccacacattgcgagccagcgccgtcttgatctctagaaaggctgcagcgtcctctggcgtccaggtgaacgggacattctttgacgtcaggcggttgagtcgggctgtcaacgccgacttgttcgggaccatttctctgtagtacgcgatcatacccaggaagcgacacaaaccttcttgttgcggggttcggcgatctgctggatggcttctaccttcttcgtctggggctggatgccgtccgctgttagggtgaagcccaggtagtcaacccgatcgcgaagaatgtgacacttctttgcgttgagggtcacatcgtattgctgcaggcgctcgaacacgatacgcaaatgctcaaaatggtccactgcattctcggaaaagatgagaatatcatccaggtacacgatgacgaaaggcaggtcacccaggatgcgttccatgcaggcttgatactcgtctggggctgtcgaaatgcccatcgggagcttcttgaactgaaatttcccaaacggcaggcagaatgccgtggctgggcgactttccctcgccagccgcctcgcgaagtagcccatgttcgcatccagagtgctcatgcacttggcgttgcccagtctcagcagtatttcgcggattttcggtacgtaatacggagatctgcgcaggtacttgttcaactggcggaagtcgactaataagcgaagagatccgtcaggtttcacgagaaagaaagctggcgcagaagactccgagccgtagatctgctcgatcacatcgagctcaagtagccgctgcatctcgcggcgggccgcatcttcttggctgcgggggacgctgtatggtcgcgcgtgctctgccgtgtagtccgctcgcaacgggaggatgtagtcgttcaggcggatgcggccgagtcgcccgctgtacaagtccacatactcttccagcaatttcaggtagcagtgctgaagagctgcctctaagtgcagaggtatcaaatctaaaggcgtggcggctgctgctttacctgcaaagtattccaaagcttcttccacagtcaagtcggagtcagggccggtagctaggtcgatcttcttgccagtggtgtggacggcgagctcgctaccgtggtgcccttcctgaagtcgatcactaagccgagtgccgtcattaagtcgcgcccaatcgtcatatcgtccggaagtgaagataatacctcgaattggtggacaatgaccgagtcgcgtttaagttgcgggatccgaaagcgcacaaccatggcgccttcactttgcgtttgccccttgaccaatttaaatgaagttgtagagttctccagccgggcctcgtgtgactgcagcgtgcgcatgagagctgagctgataatgctgcgcgagcacccactgtccagcaaggcttggtagcggtccttgcctgcctcgagcttgatcatgacgcgcattgggggaggcgagctggccggcgacgcgtgcagacccacgaaaagatactcctcatcgctggagcttccggcgcgctggcgctgttcgacgcgcgtttgttgctggccacgctgtccgcgttgatcactcctaggcccgcgtctctcgtccagttgttggtattcctcctgctgattatcgtggcgaagagcgcggcagtcctgggtgttgtgcgtgttcgtctggtgaaagctacagtacttgttactcgccaagttgttgccggtgttgtggccgttgccgcgaccatggtttcctcctcaggactgttgccgattgttgttgctgttgctgctgttattgcgattgctgccgttacggttgccgttgcttcgacggctgtgacctcgtggattctcgttggcgtagttacgcttgtcctgtccgctggtacggtgcagtcgctgttcgccctgctcaatgcgctcgaaaaatggcacgagggcggccacggtagtatagatctggccgctcgcaccgtatttgttctgccactcgtacgggaggccgcgcttgtagaggcgacagagcgcgtcttcgcacatcggcgagttctcgttcagcagcgcgagcgtgtgctccatgcgcaccaaggcgcggaaccgcttgctgtactctgacagcaattcattgcgggccttcttgatctcccacagctcctcctggagcttctcgctgtagtccgtcggcagcacgacaaccgatgccttgcgcagtgcgcgagtgaactcctcgtccatgcgcacgtcgtcgtcggtgatcgacgcatcttcaaatgcctcgcggaggtcgccctcgagcaagatggtcgtgttgaggaacttgtcctccgcgttccagtgtttcagcttcgccagctggttgaagtggtaggtccactcgaggaagtccttggggccgccgtcaatgaacttggccatcttcttcgtgacgacctcctcctcgatgcccttctccttgttcgcagcacgcactgtgattgattacgtgaggtagcgctccttgtcgtccttcttggtggagccgctcatgattgacgggtaaaccaggtcggtcttctttgaaatgtttcaaaatgccaagccgcttgagtcctgtgagtcgaattgagaactgattgattgaatgaagttactcctggcatctcctagcagctggactactcatgtagcgccttgaaggcaccgtgtgtacccaaagcaagggttcaaacgaacccaaaacgaaactcagatgaagtcaacccttacgccagggaggacaggcgctagtgtcgacagggtgcagaaggagttgtcaaaggggttctgttactacgaactcgcctgttttatctagcgtttaccgccgagtattgcagccaacaacgctgaggtcgtatgcgccccccccccccggacagtgattcagcaagaagaacgaggggctagaagacaaggtgacaaattgtccctgacaataccacaaacacattaattttgcatacactatatcccttcccaccctcattcaaacgcgtgcacgaggtccaagcaacgagcctctcactcgaacaaaaaacgaggcgaagttctcaagaatttgttttagaaatgtgcgctagcggaggttaatcagaccagcgctccttaactctaaaatactactacttagtagtaaatgtcagtgaacaactgatccgcaaaaaataaatgcgctgcattttcaactctgtgcctagatcgctggtgttaggaggttttctcagccaattcgcagttcgaagaactgtcgattggggaaggtttttggatgacatcgaacgacattcacgctcattcgtcacttcacccccgtgcggatgacatcaaacaacattcacacaacatcatacagcactcaatagaatccggtctgaattacacttacagcttttgatagatgcctattcgcctcggagcttcttttccttctagattgatgccaggcaccaccagaggagtggagctccagcacaaacattttattgttcgaaagaatgcaattcttgctattgcacagataacgttatgtacatgtacgttgttcgtcgtagtaatagcgtctgtgacaattacaaccctcgatgctgaccttgagcacaactgatgtcattaccttatcactggaactcttccaaaaacaacacaaaaataaatgtgtcatgagcacaaaaatagggctgcatacccagtacaatatgcgaagacgcaaatatcgtctccacaaattgtgtcatgaagaattgtgtcaattttggaacagttccactgcatcgtattaaactgcatgcggctccagagcactcaacatagtactcactcatttcattagtgttaaagctatcgattcaatctgttcagtcctgggtcataacttataccctcctctttcagacacagattttcttctgcatacatagagatttattgaaaatcgtttggtcacctgagtttgccgtgacttaaattctcggcaggctgatattctgtgaatccccacactcattggaatgtgtctggatggattagataaaacattccactaaaacttcgcataaactacttgaccccggtgaaatttatcctacgaaaaaggatcaaatcctttgttgatgtggcacacacagaccgttttatcctagcggggcaggcgtctcccatcttatcggtcgtgtcgcatttgacaaagcgaccgttggaagcataaaattgtagcggtattcagaccaatactcagctcaagtctaaatgcgatttttatcctagcagataggataaatctggatttttgataagctgttagagacacttttcatgcggcaatttcgcaatgatggacaatgagagacaccaagtggacactagtatcttgtagaggaaggaaaaggctttgtgtgtgtggcttcagacactcgtattacccagcactagtttctgtaaaaagcgctaaacttttgatcctttcttttatcctacggccaggctcactggggttaacgtttttaaggctatgcgatccaagatgggaattatagcttgatttttttttttcattcagcatatttttatccaaagccaaatctatccgccggcaatgcggtgacgtcctatacggtggcgaacgaattcattcagcggagactcaaaagagctgcacctggtgttatgtattctccgtagaaaaggctaaaagctacagcaaaaaggatgacgaccgtgtatgaaatcgggagaagtatagttcaaatcaatcgagatatgaatggctcgtgtggggccattaaaactcgacactcgcttaggcattttatctacgaagactttggatgattaagtatgacttaactacattgtgacccgcagagatccaccgagcccatttgctgctgtagaataatcttctactttatcctgttcttgttaaaacaacttaaaagtacattgtcaccaatattagttcagatcatcctgatgctacatgaatgcggcacgttcagtttaatactagataaatggcaataacacacttggacgaatcgaagctgggagtttttgttgttgttagatattcaggcgatccggacaaagtctgtgtgtggctgcgccatgttttatcaaacagagtttgaatgctcctacgttttctgtacgccccggattcctgtgagagaggaagcccgggtggacatcgtcaacgcgaaggacaaacacccggtgtatccaactcctacacgcgatcgagatctgctagacctcagtcttaacttatcaaacttgaaacaaattgctggcttcattgggttaccctgcaagttcggttgggcagttagcctggaagcgctaaatgttcgaatgcacgtattttttctgttttttcgccgcctgtaagtttccgagcacaccatgcaatctaagaaatataggattggcatcagcgcacgtttcaaaggcaggaaggaataaaattacgttgattagctacttgttgataaccgttctactaactacaaaataactaaagttaaaactaaatccgtggagtcctaatccaacgagcaggagaaggtagaatcaccacggtgggtttgtcaaacccaatagttgaagtatcaattcgttggagagaactggcaatgcctttgaaaagaagcaatcaaacttggtacacttggttgtacagtggtagatgcagatactgcggctgcgaagcaggcgcaggagatgcccgagtacatcgtttccctgaaagggcatccgtacaagctagcttcgaactgcgagaccccccgggtccaccacccgggtccccaatacctccagcttctgggaagtaagaagtaaattgacgacaagctcctagaagacggttaccacatgattacgctgtatgctagcggtgaagctcaaataaagtaaacattggttgcagagaagtactaaagatcttgctttcttgaggagagcggatttttccattaattttttttcgctaaagagggaaaatagcaaaataaaacaaagaatgcgaccagatgatagtcaaaatccaggtctgctgaagtggagggagactgaatgtaatcgtggcaaggtcttctcatgtcgccagatgtcgagccatttctccaaggcaccaacgcgggatcggttgagagtaaacaacaggatcgctttcgtcacgtgtagttgggatcgcggaatgcttggatttcggacgttgttgtagcaaaactgcctctaataggaaaacagagcacctctggacagtcacattggcgaatagatcatgactgtcttatgcggcgtaccctcacgcgtacgtctgaagagcactaacccagaacgtatcgatctgggtcaccagcacattattggggctaatctacgtcgacaaattatagagcttgtaacactacatcgctagatgggttggagcgaagtcgttcatggcgaaaatccgagcgtggctggaggtacgccggagtacatcttaaccataatttgttttagggcaacccgctgaattctagtacttcctcttggattaccattagctcgtcatccctaacagtatcatagtatggtgttatgaggcactttccagcaatgccgtaagctttttgtcatatcgatcgatcatgtcgtcggagcttggcatacctgcttgagttcctttgggtcctctcttgcagctacccatttgtcgataagggcagcctgcagctttgccgccaatttctccgtatagcgtccttcttccctgcatcgaggatccacagcatcctcctgtcgttgtagttggctctgaaggcatcgatcatggtcgttttcttctcggggcacagacggttgaagctatccaggtacgctgtccacgtcttgaactccggacagcgagaagagtcttctcatcagcttcgtccagccccagagaacggaaaaccttctgcggcagttcttcagcttttaatcagaacaaggaccgttccctctccaccatcttggcgatttctacggtacttgggttctgcatcgcaatcttgatcattcgttcgacggacgcagggctgtaatacgtatcaattggcgcgaacaatgattcggggtgccgcgggttcttcctgttgaaatccttgacgtgctgcatccaaatctggaacacgcggtcaccgagaatgtcatcccccgcgtcgtcaagagcgagcagcgtaaatatttcttgggagaatcgtttttagccagatagccctcgatcctcttcgtctggatgccaacagcgatgttttccatgctggggaacctcatagctcgcatgagaacttcgttcacaaaagcttccgggtcgatagtttctatgtttgagaaaaacgaagccacctcgcctggtttgcccttgaatagtacatccaagtacgcgacccacgtcttagaaaaaccggacggacctcctgtcggcggacttagtatgttgaggacattgttggcagatttcccactgttcttccagactccgagcagtgcagactccaaatctgacgccaatgcccgcgttttcgcctgctccttcgcccagtaaagcattgtcgccacttttgtgtcgccaaatccttgcgttaacaattcgaccaaagtcgtctgctctttcggatacttcgtgttgaaatcccccacgtagctggcccagctcttgaacaatggcatctccaacatcgttctatgtggatttccgagaatgtaggacagtggttgctggttgagtccgatctctttcagaacagccgccggagttttcccaccgtcaagccaaaacttcgccaggtcgttctgcaacttggtggcgatgattccagttgtcgcgagacgtttcgccgcctcagcatctgcgaagaggacgcccccgttgtggtacttcgtaagcgtcgacgccatggatacggagtgcttggggtacttggtattaaactcgtccacgtatttgacccatgctgcaaattcgtcgtccagatggatgtatagtgactcgtcgagtttcataaagtggaagacgtcgtcgggcttttgcgcggcggccaaccagtgctgcagttgctccttctgcagtctcttggcaatagcgatcgcttccgcggagattttctctgtcaggaagaatttgatgatcttgtacagaccagcgtcgccgtactgatccgtgagcgtcgagaccgcagacttcgccttcgccgggtgtttggcagtcaaatcgtcgacgtacttgagccaccgagcgaacgcgggctgctcttaaccttggtaagacccaggcggtagaaaacaacgtcggcatctttcccttcggcgagccatttctccatattccccgacaatgccttgagtttctcgctgttcaccatttcatccgacgctgggccattatgaagcatccgtttgaggtccgccggcttctcctcagcacccatccacttgttgatccgtgcgctctgcaagttcgtcgccagcttctccgcctccgggtccttctttgccgccgccagactttttaccaataccgagtcatgatagctatacttcagagcatcgatcatggtcgttttttcctcgggataacggcggttgaagtcattcaggtatttggaccacgcattgaactctgcacttgcgagcagagtattttcagccgacttgtggaggtcaagatcgcggaaagtatactttggaagattcttggagtctagccagtacttgagccgctccctcttcgttcttctaatggcgatggagaatactttgcccggatcgcgacagcaatcctagtcgatccgcctccgaagcacacaagtgatgtctggatattacgcataattttacaccacaaactcgcacgcgcaccaacgacgctttttattccttggatagatcggccgtagatggcggcaatgtattcattcaagtcataaattataaaatatgttttggtagaagagtatgcattgagactatttacactgcactggagctagactgagacggttacgattccactgaaatgtgggggatacgaaagacttctcaaacaatagagacaattcctccaaattcccgagcagatgtagaagcggcgtcagtaaatctgactcagttctgatgactgagaggcgttgtcccactcgaagcgtgcccacccacgcatggcaatttgctggtttagaagcttggacgccagtaagggcaattcgccgtcgtgcagctgtggaaacacgtttcgcagagttttttcagtcattgtaaaagaggttctggtggtggcgaagacggagtcgggccctgttctttggatttcgtcaacatcaaccacaatgtcggcgaaccacagcgaaaagagccaccagttctgcatcacgcaccttcacctctacccgtgttgaataccacatttggtgccatgaccgaacgcacaaatccacgcgttccaccgtcatggggtctggttggtccgtcggtcgaaagacgtggcgaaaaagtcggaagtactccgctgccaccatccacacatggtaccttgacgttcagagaacgttgcttttgttctagctcggagatctcttcccgtagatgttccgtgtccttcttgaggcctgctgtatagtcgtgctgtttcttccggtatctccgctgtttatctcttcgttgttctcgtctcatcttcgcgtcgcgaagtagaagttccgctaccgctgcgtactggttctcacttgtccatgggttggtcgttgggggctcccgagtaacctctcgtctcgcgtcaggcggcgcgcgcttggggcttggataagcgacgccagttttctgcgagtcttcatcttgagtcatgtcgggatatcgctccattaagttcgacggatccaattctcttgcctgactctgaggcggtcgcttcgatcgtatgtcacgttctactacgctgccgataacatcgttgctgagctgatcactattgggtgggcgcaggatgctgttcatagttcttgtaaactgcgaaatgagaagtggtatggtagagtgaaatcatgtattgcaaaagtgtagagtaaactttctacaaattcgaagatgacgcagggagtcaacacacataaatttccatgcttacgccgttcagatagtgcacatcccgttggtcattcccatctggaaacacgcgatcattacgacgattgtgattcagggctcacaacttgtgactaataagggtgaacgatgtacaccacttgtttccacagctgcacgacggcgaattgcccttactggcgtccaagcttctaaaccagcaaattgccatgcgtgggtgggcacgcttcgagtgggacaacgcctctcagtgcgtgacaagcatcagaactgggtcagatttactgacgccgcttctacatctgctcgggaatttggaggaattgtctctattgtttgagaagtctttcgtatcccccacatttcagtggaatcgtaaccgtctcagtctagctccagtgcagtgtaaatagtctcaatgcatactcttctaccaaaacatattttataatttatgacttgaatgaatacattgccgccatctacggccgatctatccaaggaataaaaagcgtcgttggtgcgcgtgcgagtttgtggtgtaaaattatgcgtaatatccagacatcacttgtgtgcttcggaggcggatcgactaggattgctgtcgcgatccgggcaaagtattctccatcgccattagaagaacgaagagggagcggctcaagtactggctagactccaagaatcttccaaagtatactttccgcgatcttgacctccacaagtcggctgaaaatactctgctcgcaagtgcagagttcaatgcgtggtccaaatacctgaatgacttcaaccgccgttatcccgaggaaaaaacgaccatgatcgatgctctgaagtatagctatcatgactcggtattggtaaaaagtctggcggcggcaaagaaggacccggaggcggagaagctggcgacgaacttgcagagcgcacggatcaacaagtggatgggtgctgaggagaagccggcggacctcaaacggatgcttcataatggcccagcgtcggatgaaatggtgaacagcgagaaactcaaggcattgtcggggaatatggcgtagccatcgcacagccaaaagagtagattagagcgcatcttttcatttggagcgcattgctacttggttgctgtaatgtactttgctctcaacgtttttggtatactgcatcgccacagcacaacgctgatgcggggggcctcgttagtacttattactggtgtttgaagcggtgggatcgacgacctctatgatgggtagtaagaaaaagtcggaagtggggtccaatctgtgtctatgtcatttacagctaaccccaacaactacggttacttcgcgtcgtgcacgctaatacaagtacttagcgccgtggtcggaacaacttcgacctaacgcactttaatgtgtaccggacaccgattacgccgactccgtcttcgatctacccggcgacgaataccaattgcatctaccgtacctcacagaaagagtggagtttaatggagcttaaaagcagttaatcaacatttgtctcctctcacagaaagacgaagtggccgactattcaggctggattgcgaaagaaactcgactctctgcaaggagattcttaaggagaacccacaacgacgacgaagaaaatgaagaagagaggggaggattgaccccgaaaagctaaagactctgctcacgtcctcgaagataagcccagaaaaccttcagaaatggctcgccgaagggaaagatgccgacgttgttttctaccgcctgggtcttaccaaggttaagagcagcccgcgttcgctcggtggctcaagtacgtcgacgatttgactgccaaacacccggcgaaggcgaagtctgcggtctcgacgctcacggatcagtacggcgacgctggtctgtacaagatcatcaaattcttcctgacagagaaaatctccgcggaagcgatcgctattgccaagagactgcagaaggagcaactgcagcactggttggccgccgcgcaaaagcccgacgacgtcttccactttatgaaactcgacgagtcactatacatccatctggacgacgaatttgcagcatgggtcaaatacgtggacgagtttaataccaagtaccccaagcactccgtatccatggcgtcgacgcttacgaagtaccacaacgggggcgtcctcttcgcagatgctgaggcggcgaaacgtctcgcgacaactggaatcatcgccaccaagttgcagaacgacctggcgaagttttggcttgacggtgggaaaactccggcggctgttctgaaagagatcggactcaaccagcaaccactgtcctacattctcggaaatccacatagaacgatgttggagatgccgttgttcaagagttgggccaggtacgtggaggctttcaacacgaagtttccccaagagaggaccgtcgtgatcgagttgttaacgcgaacattcggcgacaccaacgtggcgaagatgctgtattgtgcgaagacgcgagctgaaacgcgaaaattggcgacagatttggagtcagcactgctacatagaagggtggaagaaaagcgggaaatctgtcgacgatgtgttcgacatactacctccgccgatagtggccaggtacgattttaccgggacgtgggtcgcgtacatgaatgtactttccaagggtaaatctggcgaggtggcttcgttcttgtcagggttggacacccgcttccctgaagctttagtgaaccatgtcctcctgctagccgcgaggttccccagtatggaaaatatcgctgttggcatccagacaaggaagatcgagggttatctggctaaaaacggacctcccaagaaaatatttacgctgcttgctctagacgacgcgggggatgagattatcggagatagtgtgttccagatgtggctgcagtacgtcaagggtttcaacaagaagaacccgcatcaccccgaatcgtggtttgacccgctccaaagctattatcaatccagtggattggaaagaattatcgagacggggatacaaaacccaagcacagcgaaaattgccaaactggcggagcgagagtggctcaacgtgtggttacgtgaagaacagtactccccccaaggttgcgtttggttacctgcacctcgacgacattgacgaaatgactttactctccaatttcaagttcaaaatgtggacggagtacctagacgacttcaaccgtctgtatcccgagaaaaagacgaccatgatcgacagcctcagggcgaactacgatgacaaccaattactcgcagtgtttactgcggcgaagaaggaccccagcacggagaaattggccacaaatttgcagagcgacctcatcagcaagtagataaccggtaagtagaaaccggcggacctaaagtaaacaatccgacttgttgctgccagcactgacaccccctcactttcgatagtgggttagtggtcaggatcagggatgggaagtttgaaataaagatgtagatagatgtggattttgtaatttaatttatttatcttttgatccacaactcaaaagcgaattatggagaagtggctgcttgacggtcgtcgacgctgccagcgccagcgccacttgctagtctcgttgcgcatgtcaagcacaagcaaggacaccgtttccgcattccctaagcccttcggtgaccctcgtcaaggcgacatgcgtcaccagagccaatactgtcccagcttcattaaaaagtatggttcaggctgaatgacaaacacagcaaagactacgtcggcgtaacacttgctgctgctcgcagcggtactgcatgcatcctcgagcctgccaacacgctctaggttggttttcgcagcaagacgcagccgcttcactccaaggtacgtcgccgcgctttaatacttgcaatacagactacagtatagtgtatcatagatacatttttggtgtaaatgtgaattattcgaatgatatatttttctgtttctgagggccatatgcataattaattcgaattgttccgtcagggttgggtttaggatttaggaaatgcctgcggaaatcgttccagtagtatcgttaccacagcattgctgtttattttttttctcgtctcctacaatctcattcattaatacgtactgtggcctagagataacagcaccgaataccgcacaccttgaggcacttccacgcaccgctcacttggcaagtgcatgtttaaacgcaacccagagcggtctgggccaccttgtggtcagcactagttaatacggtagcctccagggatatagcagcagccaggagtagaacagaatgcagacgcatgggcagttttgctgtttaaaatggctcttgcaacgagacttcgagtgatgaaagcgaatcgcaaaatgatacttagtagtactgaagtacaactcacaccccttgtgaggggctcgcaacgtacaggtaacgcatacattgattgcagaagaacccgttctcttgcgctttgctttcaagcggcagatctcatgctcagttgtgccaacttggatgtttctccagatttcccaactaccatgtgcattttcctttttgatggttgcaataccattattattaatagcggcgatactgttggtgctatggttacttcttaaattgcagaagatctttttcgtgttcatgaacctcgaggcgtacatgaaattccttaagcgtgttgaaaccttgtcacatctaatcgaatgatgaggtgagcactaaaacttcctgtcacatccacttaagtgatgagacgagaaccaatcccttgcaactccttcacatgttgggacatatacagcaggaagcaccgatctgtgactcccaatacgtgtacaacagaaggcgcttctcgataaacccttgatcattttacgcattgcaacttcccgctccagtcttcatgccggcaatggcccgccacctcgtggtggtcttacttctcttcgccttcatcgcgcgtaccgatgcagatacaccttcgacaagctccaccgtattggcgtcgactttcttcgactgggctgatggccgcactgcgagagcgagaactgccatcagggcgatgaggttcttaagaggtagtagcgatggtggcaacagttacgacgacgagagagggggggtcgccatactgtcgtcgaacagctcaaggtcatgttcacaaaagttagccccgagaagctgaagacatttctcaccaaggagaaaccggcggagtgcgttttcgtccgcatgggtctcaacaaggctaagggcttgctgttctcgaccaaaaactacaagaagctcgatcagtggctcacatacgtcgacgatttgagtgccaagaaccctgcaaaaaagggaatgtccgcgatctcgattctgactgctcactacgacgacgctgcgctgtacgagatgattcgaatcgccaggacaggggagttgattccggaagcgaaggtcattgccacgaggttacagaagggcctccttgagcactggttggccgctgcgcagaagcccgacgacgtctttcacttcatgaagcttggacaggcaggatacagtttccgcagcgactcggaattcgccgtgtgggtcaaatacgtggacgatctcaatgcaaagcacaccaaaaatccaacgttaatgggctcgacgctgtcggaaaactatgatgttggtgcttgttccgggaagctgaggcggcgaagagcgtcatgaaaaccgaaaccatcgccaccaagttgcaggaagatctgaaatagttttggctatacagtcggaaaactccggatgacgctctggaactgatcgggttcgacaagtcagcgtcaattacctacttacaggggagctggtatgcaacggttctggaggagccgctgtttcagagttgagccaggtattcgaacgcttacaacttaaagtatcccgaagacaaaatgacaatgatcgagaccaacaaacctttccgcgtgtgggtggcgtacatgaataccgttctccaaaggaaaccagacgaggtgactgcgctgctgtcgtcattgcagagttgcttcctggaacgaccgctgaaccaactgctcctagaagccaagaagttccccagcatggaaaaatccgtcctcgccacgcagacgtggaagctacaggagtatttggcgaagaacgaatcccccaaaacaagcttcaagctactagccctggacaacgtggctctgtcctcgctgatccgttgttcgcgaagtggatgaaatacgttgacgatttcaaggtcaagaatccgcagtaccaagaatcctggtttgagattttcaagctcaattatcaatggcatcaaatcgaacgaattatcgggaaggagctgaaaaatccggccaccaggaaaattgcggagaagatcgaggcgcagtggattaaacacgagctagatggaaagagccttccaaaggacgtattcgcttcgctgaaggccaagttcgcgaacgaaaatccactttgagtccgatgttcgagtcgtgggcaaagtacctgaagcgattcaacgaaaggtttcccaatgacaaaacgacgatattcgacgtcctcgaggcgagctacgtcgacacacagctgctgaggattctctatgcggtggagaagaacccaaagagcaccaaggaactgaaggcgctggcgactgacctgcagagcgctcttatcagcaagtggctggatgcaatggagaaaccggcggatcttcgaaggtggtttcaggacgtaccatccgccgacgatatgatagaccgctacacgcagaagctccacgcgttgtcggggaacacctcataaccgcgtctcgtgcattgaattcgggtcgaactgttggctagggaaaaaaccatcgtgcgtcttctttcagaaatacagtgttagaaacgcttgatgccgagttttcaatttccattttaaaagtatgtgtgctgttaaggagctcgaccagtttaccgcaatgttttactttttccgcggaaaaatggtcataactttttttctagacatcctctcagaaatttaaaaatatgccgcaaatctacagaaactcgcctacaacaaggtgatcttgtcgtggttctagtgttttgcaagcgagctacctgcatcaaggaaaaaccaggatgctttgacgagcgccggccagtttagcgcagcgatacatattggggtttgtatgacgaagcatcccccattgcagaaaacgcgcaatgtgttacaggaagagccaaaatctgtacgctcttcaccaaagtgcgtacttttttcaccacaagggccaagggggatggatgcttcgtcatacaaaccccaatatgtatcgctgcgctaaactggccggcgctcgtcaaagcatcctggtttttccttgatgcaggtagctcacttgcaaaacactagaaccacgacaagatcaccttgttgtaggcgagtttctgtagatttgcggcatatttttaaatttctgagaggatgtctagaaaaaaagttatgaccatttttccgcggaaaaagtaaaacattgcggtaaactggtcgagcaccttacccactagaagcactggaattcgaggcccgtcgtgttttgcttttttttgttggcacagcgcgcgatagtatgcatattatgcatacattactggtcttaatccaccggagataaaggctcgcaacaatactccgagtccgaataacatgaaccaatgaagattttcgtagcgatatgaatttcctatggagcgggtctgttcccacagtcacatctagcgaggtgatgagatgagtaccattcccttacatgattgtgcggtgctgtacatctgaatctgtttagatacaataacagcgaacgtaaactacgtcagagtggcttcgtacaccaccagctcctttgaacattttttttcttcattttccaaattcgcttcagtcgtctcttgatggacttccacgtcctcttgggcttgcttctcctcgcctttatcgcgcgtatcgacgcaaatgccccagtgagagggtccacagtactcgagtccgacttttccagctggctaatggggtccgtcctgcaagcgactggcatctccgcgatgaggtccttaagagatatcgtcggcggcggcgatgacgagagagcgggagggaacctactatcatccattccgctgctcgaaaaggtcaaggccgcgctcacgacttacaacatcagccacaagaagcttggcaaatggctcgataagggaaaatctgctgatattgctttcgttcgcatgagtctcaccccggttaaggaggggttattccatagtccccggctcgctaagtggctttattacgtggatgagttgaatgccagaactcctggaaagggaacgcccgcgatctcgacactgatcaagcactacggcaacgccaaactattcgacatgattaaatttgccaagcaatctgccaatgcagagacagaggcactggccgtgagactacaaagtgagcaattgcagcgctggttggctgctgtgaaaaagcccgatgagacgtttcatattatgaagctaaatgtgcgatggtacaaatgaaacggatggcggggtcccacctggatacctatctgatgccggtatcagataggtattatgatcttcgaattacacaatgtgcgatgtagtcgttgatgctgttttctagcaacttcttcttgggtatgatggcgagtgaccaagtatttcgaagtagatcgtttcagactcatgttcttgttacccagcttgtactcgtgccagggtatgcatgccgctctgccttcgcctatgatagaacatagatttattcaactgttcacccgtgaagctcctacaacgccgtcgttctctgttggtcgcctacagaacgcttgcgcattcgatccactttataaatcaaaaatggaaatgacgcgataaacatgccccctcactctcgaaaattaaataaataattgccgatactagacctgtttagtgcagtgcccacaaatgcactaaagtactttagtgcacgcgctaatgtccagcatcagttgtgtgcaggtgcgccaaaagtgcactaaagtactttagtgcatctgtagggactttcgtgcactgcactaaacaggtctagccgataccgatgaattcggatgggggggcccggggtcccgccaactgtttcaaatatctggaagacccggagttcgccgtttgggtaaaatatgtggacgacttcaacgcaatgtaccctaagcaccccacgtcgatggcagcgtcactaatgagctacaaatctggcggtcgtctgttcaaagaagccgaggcggcgaagagcgtaccaaagagcgaaagcgtcgccatcaaggtacaggaggatctaagagcttactggctaaacagtgggaaaacaccttttgacttgctgaccgagctcgaatttgggtatgcggtaatctacaagaagttccactacaaaaccgttttggagaagccgcagtttcatacgtggtccaagtacttggaagatttcaacgcgaagtatcctgatcagaagacggcaatgctcgaggcgttaacgcggaaattcgatgactcggacgtggcaaggatgattcaagtagcaaaggctgaagggtccacgcgaaacatcgccgccaaattggagactgcgcaactggagatgtggtggagcagcgggaaatctgccgaggacgggctcaaactactatggataaattttgatcctggatttactaccgctcccctcgtacatggataaatatctgaggacgaaccccagcgaggcaacttcgttgttgtcaatggtgaagacttacttcgaggacgaacctctgggccgaattagccaagcagccaaacagcaccccagtatgggggcgtgggctaagaccacgtagaaaagagagtggcctccttgtgtgcatttggtcggataccagcaaacagtgccaagtgtattggttagatcgtgcgttttgtctagggcgtgttaatcgcgttcggcgcgccccgcgtaactatgctttttttttacgacgcatggtgggtcaaagggtcttcagaatatctaacggatgcttgctacagcactgaggtattcctttgcctgctccacagtagtgtccgtcgcaatcaggtctgctcgttgcgtgaatatgttcgcgggctagatggcacaagttagttcagcatgaactacgttggcggcacgattgtttttctttatttaccgggcttttgaccggaaaagtcctttatcaatcctcccagctgcgacgccggagagggcgacgagttttgcagctaaaagcgaccacggaaaccgattttggaagcgtgaggcgctgatggttggcagctttgttgggaatgccgaggcatatttcgacttgtacttcgtgttaacgcttctgtcacgtttgcgcagcgaggatagaactcgacttgccggcaaaggtgcgatgttccaggagcacaacgaggcggtgacacggtgggctttggatgagttccagacttccccattgcggtgcacgtaagcctgaagctataataccacgacaacgttattcgagcgattctatcgccagatgcaactgcactagcagacgcgcttacgctgtagctaagcattggcccagccttaacttgaagcctctgcagacactcaagccactctagtcgccccccacactcactcgggcaccaaacaatcatcccaccgaaaagacaaacactacaatttggagaggggccgaacgcaacgacagtcgtgtgtattgattcatcagccgcgacacaccgtcgtcttcttcactgcgcaaaattaaagctcagcgaatagacctggtcgccagccgcagcttacgcgatgatctaacgcagcaacgtcccgtgcgctctttgtgaaatgggttccacttcccgaccgcgaggagcgagaaagagccaagccaagtctgcagaggaagatcgagcgcttacttgagcttcttcttgatgcgcagctggttgctgtggccgcatttcttcttgcggcagttggtggcacggggcgggagacgcgcgtagcagatgcggcagatctgcttctcgcagttcgtcttcttggccagggcggcgagcgtgggctcgatggcaccaccacgcaggcgcagcaccaggtggagcgtcgactctgcaataataaaaataccaaagaattagcctccgaattgccgcaactcggtcattttgagcgtattgagacgcacccttctggatgttgtagtccgagagcgtgcggccgtcctcgagctgcttgccggcgaagatcaggcgctgctggtcaggcgggatgccctccttgtcctggattttctgcttgacattgtcaatgctgtcggacggctccacgtccagcgtgatggtcttgcccgtcagggtcttcacaaagatctgcatgattccctgcaaataatagacacccctgctgtcagcctccttcttgttccctgctaattcgtcgcgtaattcgtcgtcgtcgcgctgccatccgcccctaataagcgcctgctaaaagcctgtcatctcctccgagagctgtttctccgcctgtagagcgagttcccgcgcgccgacggcgcagacgcgcagatcggacgcacgcgcactacgcgcgcgggctagaggcgagcgcgcacaggcggcggacgcgcgcggcgacatgcagcgacagagcccaacgcacctttcctctcgcaaaatgaatgcccactgacggcggccgcagaggtttcggaccaaccaagtgtcggtatacaaactccaagtcagagggcacctgcactatcggccactcaaaggcgaggaaaaaacgcaggggaggccgacgcggtccgcggttcatcggaccggttcgggaggggtaggggtatttaagacggttagtcaatcaggttgcgctacaaattgcgttgaagtggacaccttgaagtggacgatacgtccaccactgaaggacacaagctagatacagagtccgagggataaagagtgcaattacggacattacaggtctggtaatttaccagttaaagtcgtcccagtggttcacttggggcatgcaaagagccgcgctctgtcgacttcctcgccctcatcccacccgaactccttcaaaagtccctggccggtaacttccgagaacgtgaacatcggcagcatctccttctgaacgacgacgaatatctccacagtcttgacctcgaaagacgcagcgtctcgaagaaggcagagcagcgcgctgaagcagccaatgtcgaacttgtggtcatgtgcctgcgccaattggacgaagcgaacaaggcctcgcttcttgttcacatatacggcgtcgtagcctccgcgatcgtacttcagtggcttaaaccagccgatcgctggtagcacgtacatttttcgagtcaaggacttgacatcggtcttccggccagaaaacgttgcgctcgctggagttcaaatggatccctcccttgcggatgcgagcaaggaaaggcatttcttgcacccatctagttgccgcagcacagctcagtatgcttctgtgtcttttaactagcgcaggtccaccaaacatcgcaacggctgagccagcatatcgactaattactgtttgccagccagaaccccgatctctgctgagaaggtcattgtatcgctcaatcgagcactgtccgtcgacaacgtcttcgataatctcattcatccacggcacgacctccgatgcccgatagccaaacatgtatcgcgcacttccatcagcaaaatagtactttgattccacgagcgaccggcgccaatcttccatggaggtggaatccgtaagcttgggcatatcggatgcgtcaagttgaggctcaacggcgtgaaagagctcctcgtttgtaattgcttcgagatattcgtccagcgtccacgaggacatcttgaactcctcaacattgagattggtagcatcatccaagttctttatggtgcgatgcggcgtggagatcactgcaagtcgtcgagcatcccaattctgcctgagccagccggtgcaaaccatcacttcatttctgttgccatcccccactacttcgtcgagaaacgcgatgtgctgttttgaatcttcaatttcgttcaaaatcgtgctcaagtcttctagataaggcacggtcaactcggtggttttcttggagttgccttccagacgaacacaaatcggaggttcctcacgcatgagttgaatccacgtgactacccattggcaagtgtgagcaagtgccaaggcaaacgcaatagaagctgcagacttgcccgaccccgttgggcccgacacgtatccggtgcgtccatttcgcacaacttcgtctcgcaaaaactcgaccagctttgcagcgtcttcacggcaaaatagtggcagcatgctaccgggaacaggaactccaaagcctgcgatagctgcgcggtcaagcttccagactcgatcattagcgccgcttaatggtagcacggatgcagttggatccagcgttgttgcccgttgccacaaggttttctgccgcttgaatgattgcagcggcactacttccacgatcatcgcttgggcctcgtcctctccaagcccagccactaatctcgatgatcgaaggagcttccgcctcgttttgtcttcatagactgctcgattctcgtagaccttcagctgagcactgtcaacgtcttcgagctggccgtcgttatacatcgccttgaccgcacctcggagcttgacgacgtctgcttcaccagctaaatcctccacgtagtctgtcagagccaatgcttctccgtcttcactcacctactggaaccaccgcttcatcgtgataagcaaaattattctttggttgaaaactgcgaggctttttgatggaatgcgatttgtcagtgagcagaaattacgaaatgaacctccaaaaatctacccacagtaaaacagcccatatagttcgtgacgctgcgaaatcgctttcttctcgtctgctaacgggtgcagatccagtcaatccttaagattcttgactcaagaatgctagcttttgaaccgacgctctgagcaaatagtgacacgtgatccgttagcatggcgatacagttccatcgcttcacggctaaagaaggaaaatacgctcttctccgccaatcttgaaccacaacttgcttcgagacgagcggttcgacagttgaccatggtgaatgggccccttcatggcatgagtcaggtgaactcaccagtcgtacaagaaagacacgaaatgaatccaagcgctggagggcgacgggaatctgaagatgctgggttcactttgcaagaacctcgatgcatgcactcacgctcaaactgcacgcgctctgagctgcacggcggactctgaggcacggcgaaggttgaagcactcccccggaatcagacagcgaggcgaagtgccatcggagcccgtgattggctgacaacttcaacatgggtggtccacacctatgatcaagttgcacttttcgcgatcattggattgcgggaatgcgctgatgattgcttgtcaccgctcgagttggaccattgcgcgccgcgcgcgagtagacggaggatgcgccgcgtgccatcccgtgccatgccggactcgcccgttcggacacctcgatggcgactgcgacaggcttgcagagggtgtgcccaagttattcgtcgctcgcgtgagggcggcgcgctgcaaacagggcgaagtctgcatggtgtcatcgttgcttcaagcacaaaagcacgcggcgacttgacacaagccacttcaacgatagcaaggcggccatgacggtcggcgttcgggggttcaaagcagcaggcaggcaggggcagcctttgcttcgcagcacctgatggttgatgtttaattgatagttgctaatggctcgcgtggctgcgcgccgtagatagcgttcaatgctgctgactggtgatcgatttagccgtgaaaaaatggtctgaaacagtcgaagcagcactcggatcaccgggacagttgccgttaccatctatctatcctcgctcgcaccggtgcttcacgcggtcggcgcgtcaacagcgcacctcgactgtgccgccgcgccagctggggcgccgaccaggcagcttcacacaagacacaactgaattcaacggctccgaggcaaagaggggcaacaacagcaacaacagcaaccagtctgatatggagaagctcctcactaaaattggagcaccatcgtacctgcccactccagctgaggtgctcgacggcgtccgatggctgcgcgagaacccggccatcgctgcgggagtcgtcgtgggactaaccagctactccgtggccaagtactacgagtacggagaggacagcgacgagagcgacgaagagaatgacgagaacgtcgaccaccaagacaatgcgccacgagcaagcccagaggaaattgcacggtccgtgacggcattgcacctcggactgctgaagattgacgcgaccaagagggaccgacgacacagcgctgccagctccgccagcacagcatcgtcacttgcgagctccggtggacttcgttcccgtgccagctccgtgtttgacaaggcctaccacgaggtgcgttccgggctggaattgtagtgggtttgccagcatctgtggatgctaatgatcactttgtgtgcttgtgtggcttcaggaactgcagctccaagagcagggcgtggagcaggtctggtcctgtttgcacgagggtgaatgcccacctggagagaactgcagcgaccctgtgtgggggtggtttgtgcctgctgccaatgcctccccaacaaacaaaccgtgaagaacagtcacaaccaacccaactccgcgctccagttcaagacgcagagagccatatttatacgttcacgacgctgagagccaagcatcgagaagctcagcacggagaccatacagtgcccaagtgcgcgcacacagctaacctaaggccaagcgatgtcaatacacggagccatttgccacgtcgtcacctcattgatttttgccgtgtgcaacaagttgaagatcaacttggctacatctgaaccgtacttattcggaacatagcttcattacgtactccacaccaaccatgtcaacacggggtgtaccatttccatggtacagcacaggcgtgcggccaacaattcgttggtgtctccatcgcgcgcagtagccccagcagctacagtaggtactgccgtcgcaccgtcgagacagcgaaggaggccgccatgacgtactaccgcatcggtcagcggctcaagatgacgcgcgcagtcgccagggcaatggcgcgctcgtccgcgggcaagcgcaactccgccaccatcgagaagatggtgcagaccaccaagagccgcttcggcagcgccgtacgtcgtctcccaatgctccttcagctttgaaatgcattgctaacttgtgggtggttggattgacaggtgggtcggccgctgggcgccgcgatcgcgacgttcatggactctggcgtcgcgttcaacacatcgtccgagttcctgttcttcgacggagaagacgacgacggaacgtaagaacttgcgctttgatttcccttctgtgtggtgaagacttttcgcgccacgtgacgcttcgaagagcttttgcattaaggcactgcatactgaagagcgttgcgtggtgcatcgagacttccacaaccttgacgagttttttcggtgcgctgacgactgagcagttaatatccgctgtgattccgtgcaattagataacaggccgatcgggtggacaactacaatggacacaagcgatcagccttaaaccacagcagaagatcaatggatggagacgtgcgctggaaggagggagaagatgacactttagacctcgatgcacccgcaagcgccgcaacgttagatagagtacgagacccgagtgtattggactgttaacgaggacaaacaaagacactttgggccacagtgttagatgcaacaccgaccgtcttccactcatctaatcaagcacctctgtctcttttgacttgcactttgtatgctcgcgtttctaggccgattacgaattgagagaccacaagtcaaatctccaccgtacaatagctctactgtagctcagtggcagacacgcctcgacctgtagacgactgcaagtatggcggactcgaacgaactgcgcgtgagcgagcacttcccgcgtgtgcccaagccctgcgagaaggtggcgaccaagttcttcgcgtgcttctacgagcacggcaaacagcccgcgggccagtccgacacggaggtgggcaacgtcgcgctggagacgtgcaaggactcgctgctggcctacaacgcctgcgtggacgccgaggtggccaagagccccaaggagctcttccgtgtgcccgaggcgtaccgtatgcgcgagtaaataaatactgcttcatccaagatcattaaccgattgaatacactgcagtacttacagtaaaccaggggctgtaaggatgcatctggcttgcctccatggcgcttcttgtgtttaccactgtgtatagtatctttgcatctgcagacttaaccagacgtgaaggcagcgagagagagcgagatagaggcacaaacccacttcaatttccgtgttgagaagagttggcattttaacgagtccaaggcacaggcgtctctgctcccaccaaacaccaaacaaaacactttgactctcgaggtcgtgtgtgccgtgctgtgccgttcagtaaacgagctcgagtcttcccgtatctttgggcgcaggagatttctttgtccgaacgaccgcttactgcgtgtccttctcccactcgaggttggcgatctcgtcgtcgatctcctcctccacctccgggtacatggccgtcacctcgtccatggtggtggccagcgtcgtgcgggtctcctccatcaggccgatcagctccttgagctcctcaatgcgggccttcgagtccgccaccttctcgttcagctgggcgaactacacaacccccaagcacacacaagaaatacaccgtcagtacccaaatctacaaatgcaacaacaaataatgactaggacagtggcgtaccagcttgtcgacggtctcctgctcgttgagacgcagctcctcggggaggtcggccgacttggaggcggcgtccagctcctcgggggagatggtggggaaggagatgctcttgtagttggactccatggcgtccaccagctccttgttcttgatcaccgagcggtagtagtcgaagtcgatggcctcgggctccttgacgtacgtgcgggcctcggcggcgatctggccgtgcacatcgcgcaggctgtccagggcggcgcgcgcgcgcgggtccgtcagcttctgcgagatggcggtccactcgatggcgcgcgtctgcagcgcgcggcgcacaacttgcttgcggagctggagcatcttagcgggcggcgaaggtcacttggctaatgtaaagcgggcggctctggacggcctttagccccctcgttaaaattcaggggcggagagcgagctactgccgaaaacgcatacccctgaatatctacagcaatgaactctgcatcccaagcataacgctatggataacaacctgtctaaaatgaatacgcgaatcgtccggtggtattgattgacgcgcgcaattcggctcggatacgctctacgattcaaatgtgaatcgtgctcgtcacataggacccgcccagcaagtcgagcccaacgttagtgctgctgccgcacacatcaactcgcgcggtgctgtgtgtagacgaagaattgcaggcaagatgaacgcgttcccgatggagaccggctggcagaagatgaagcgccgctgccaggaggagccgctggtgccgctgggctgcctggccacggccgccgtgctggttggaggcctggcctccttccgccgcgccgccgacgccgccacgcagcagaagttcatgcgcctgcgcgttgcggcccagggcgccaccgtcgtggccatgtcgctcggaggcttcatcgccatcaagccggacgaggacgagaacaagagcaagcacagctaaagggctcagaggttgaagaggaagaggaagagctgccaggttgaagcgcggaggcataacggactccatggcattaccagtgctagtgactgacgctttcgttggtcactcgtggttttatttgattttaagctaagaagaacatgaagaagatgaggaagaccaataagatagcggagaccttgagcgccagcagtctattgttcgacaggctcgagaagtacttgagcagctcctgctcgccgctgctcacgttcacgagcgagtcctccacgttatcatcgattctgcagacagcaacgtagtaggtagcagcacaccatcagcacagcacactcacacaggcttcaacatactatggacataccttcgcacgaggtctccctgctcgtggatcaatgttgacagtcgtccgaagagctgtccgatgtccacgatgtggctctcaatctgggacacggcctcagctctcgactcggtgtagttctgctgctcagccacgatttgctcctgtgtcatggtggtgatgaggggctggatctcctcgttcgacgactcgctggcactaactcctggtcggggcagcgtgctggacaggttcacttcctgcagtctaccggtgtggctattgttgctgcgcggcggctgcggggccttgaaggccagtggcttgcccagcgcgctggacgccgtcttgccgtacctggcgcgcctgctctgctgaagcttcatattctcctgcctgacctctaggatgtccttgaagcctctggtcgtggccatgaggttggacttcatgagcgacacgatggcgtccgagtgcctggccgcttgcctcgagggcgccgactgccgcttgctgttgatgtattcctgcaggttgtccagctgcatgttgatgtccgtgatgtccttcttcaccagcgccgccagctcgttgatggcctcggtcgggtcgttgaacatgttgttctgccgcaccactgcagcaacaaacaacacaattaatgacacaaaacattagctcctgcagcatctctctcaagtcgagtaaagttgcgcgtacactgcgtgagttgctgcagccgcttggaggcctggtatacttccttggagatgtcggaggccgcggcgttgaactgcgcgttctcctggagcggcgtgtgcacgggtttctgcagtagtgacgtggaagggtcttgcgtcagcttcagggggcgatagagagcggtgttgggaagatggaggagatggagaacgtacctgcagagaagcgctgcccttggcggccgcatagtgctggcagagctgcgcgaagtcggccgtgcggttcgccgccatggctgcggcctcgctcctccttcttctcgggctcgagtgccgaatactgctaaaatgcatccagttacttcagacaggcgatgctacttcagagacgcgtgggcaggtctgatagtaactcttcaaaaggtatatagtaaagtgcatgaacaattctacctttttaatactaggcgagatctaaaacaatacagtagtagtacaataaaatactactgtcgatcaccagcggacacagacacggattagggcttccttgggccaagggaaggtgtggaatggctgcggtttacaggactgagcttcaagagaggcacaaaatgtctccagtaatcatgtagtactaataacggtgaaatgttctactatcaatgaaagtagaacatatgagtaaaatactaataccattatagcaaatatttcgtcactgaactaaataaatgtactattgtaaaaaatcatatttactatcgacaggtgtgcttgtcgttgaagtggggctgtattggattgggcccgacgtttgtttttacaagtcgcaacttcgtgcggaaacgcagaggttatggagcaagccccgcatatcaattacaaagatgaactcgcattttgtccagccagataaatgagcttgctgcccttcgctgaacgcaccacatgtagttttcaagtagtgggtcatggaacattacgccggcagtttttttccttaccgtaatttaccaccgagaacattcctgaaaccttctttcgggacagcagcgatttcaacgacgacccctctcgaccacttgagagcgagaggtagttttagaacctctgaaccggtcagatctgatagacgttgatttgacgacgcccactttatagcgagagccgcgtcttttggattttagggcgtttcgggaccgctcgttcaaactatattgataaaaccaatagaacattacgccggcagtttttattttcataatttcttaccgtaatttacctccgagaacggtgctagaacgatctttgtggatagtcgtccgttttaccaacacgacctctcaaccacctcagagctcgaggaggcgtcccgtcagccagcgaccagacgcgcgaccctgtagtcgtgcaggatcgcacatacgagggtaagatgaaactcccaataattactggcacattaccacgtcattttcagaattaattttatttcaaaaaaattaagaggctatgtatatagatacccacacatagaacatgacgatcgaactatctttcggaaaatacaaaggtcaatccattgaggatgtattcaagaatgatcctggatactgtcgttggatactgtcgttggatttacaaccaacccagtctcaacattagcgaggaaatgaaaatcttttttcactcaagattcctaaataacgataactcctatatatgacgtggggtaagtatcgaggtaaatctttacagcagatcagtaaattggatccaggctatctcgattggctaagaaaaagtcaattcgtgattgacaagtgtccaaagctacccaaggaactgaactaaaaaatatctctttttttacttacgctgtagtgaagtctagaacctctccggttagtctatcgaacgttagttcctgttcgctaattacgaggatcagcatattcacaccttggcatccggcgttcgtatcttggatctgaatagcctgaggtacatcgcgctcagtcaggcgactgacatcggcaataagcatgcggtttgtgagcgaccacgtctgatagtcaagtagaccattttacgagctcaggggttagatctccgttaatcgctgaaatcttagcaatttcgttggtaaagtggtggaaatcatagtcatgaccgatatcgaacacctgagtcgagccaatacgaacgttaaagttgcgaatcgacgacccgggctgaagcgtgtatggagagctgtcgaaggggctctggaactgctgaatagtagcagaagcaaagttgtttgtctgttccgcgaatgataaaagcacaacatatttcgcgtttttaacacttgccgatagctgtaaatcgaaagaagcatttagttgagtcgaggacttaccaataccagcacgctggtaaaaccactgtgcgtagcaatcattgtagcgaaccttcttaaccggcttagagataatagcttgagggttctcaagatgaacgaaagggacatgcaaacgagcagtagtaaaaggcatgtatgtaccatcgatggtaggttcaagagcatttacaaccgctccccaagcaacactaaagccagcagacacggcaagcccaccattcattggattaccggtagcagaagcggcaatcatgaccggacaactattaccagacgatagagttgtagaggttagcgacataccatttgaagcatctaccgcgactacagacgtttcctgattcacacggaaacgcaggcgaatttgagggttagccattaagtcaagctcacggaagataggatgcagatcggtgagcttaatcttaagcatgtagttccacgttcccatgattgcgttagctgcagtaccaccagctacgaaagctccacgcgaggtctggttagaaatggtagtcgatgcagcagcaccacctaccgacggccacgaactggagaagtcagcgccagccgtaggaggattcgatagaaggcgcttaacgaaaccatcattaggaatagttgcaccaccaggaggagccgagacagcaaaggaagacgagaataccatggtgtttgaatatccatcaccactggtagatgcgggtccagaactgtatgataccgactgagcagcgtcagggtacaagaacgattcagctccgtgcttttcaacgtactgagggctgtagccagtctgagcacgaacgttgttccaaaagagcttgtagtcagccatagagacgatagtctttccgtttagttccagactcagactatcaataacgttccaatttccgcattttagagtagcacatagacgattggcagcggcagtttgagcagtgccaccattcttcattgagaccttgtagggaagcataatgtaggcatcacgaaggcttgcgaagccctcggaaccgttaagctgagccgtagcatcgatagtgatgacaccattctggtacgaaccctgatttaggtcaataacgtgcggtacacgcttgctcgaagataccttgatctccgggtcgctcttaagcgagctctggtacaagtactgatcggatagttgagtttcgctcattgttgaatctatatggatcctaatatagtttgataaaattaaatattatgtcgcacctcatcaagccaatcacctcagatcatgatctcatcgaactcgctgagaaatgaacgttcaactcgataatatattcgaatcaaatgagataaagtcccatccccccaagaaagggtcatttctgattctacttcgccctcctaatcttgaggtaggacactggacggcggttcataatggtgaattctacgatagtatgggggaaggaccaccaaagaagtatggtatcgatcgatacaacaccaagcaataccaaggaacctatggagactactgtggaccattctgtgtcctatggctatattcgaagcaataccgtaagccaaatgtattcaaaacaatgaaagatctaaatttggcaattctggaacaaatttaattcaacgtatatagtaatcatgtatcgcgaattaacaatctccagtgatattcctgcgcggaagcttaccaaagctttcaagactggtaagctcagcctcacctcaagcgaactaaagggtagtggttcagtcatccatctccaccctgcttcgtttgaaaaggcgctcaaggctcgtaaagctggacgcggtgtcagactcgacattaccaagcacgaagtgaagaagggctacaaaaaggctcaaggaggctctatctggtccaaagtatggggagggatcaagtctgcatacaaatttgctaaggattcaggtctactatccagagccgttgatgcggcggttcctgctttagctacttatgctggtcagccaacggctgctgttccagccagagctgcaatcaagtccctaaccggcattgatatttatgattccgatagcgacaaggaaggaggtcgcgtatcaatggctgacgtaaagaaggctgcaaagaatgctcttgcatacacgaagcgcaagggggtcatcaccgacgcggtcgatgctggagagaagttcctactatcaaaagctaccaagccggaacatgaggatctaatcagatctgtgcgaaaggaggttcgtcgccgctatggtgtaggcgtagcaaagaaacgtccagcgaagggttcgccagagatgaaggctaagagggctgcgctcagggcacgtcgtaagactggtggttcgtttacgttgtagccgccctaaacaaaatactctggatgtcttatttttatggacgaatcagaagcatgatggataccgacgtatctctgaaaatcacttttttatcattttggttatagatactgagtgtatactagctcgagcgccattatgacagttcatccacgcatactggctcggtttgtatgaaatgacctttccaatagcggcatcacctctatcaaaagcactgacaatatcaccagaagccacgtattcgtttttgatcagatcgcaacgaacgatgtaggaactggtcgggtgaatctgaggaatgatgttcgatagctgagtacttgcaacagtagctgatgtggaggggtatgtacccgctgtgagaccaactactttaccgaattcagcattatcgatgatcagtcgaggaacgcgagtagtagtcggcaatccagtaccaccagaggagtataaaccggaggttggtctggtccatgttccaccggtagttggtagagttgtaggcgtaggagagaaatcaagctgacaagcgtaatagacactgttagcactcattttgatatagaatacgttactcaccgacggatcgatgatgcgccccagcattgacaagagcagtctgaatacttcggttgatatcgtcatacgaataaataccatcagggaaggatacactgattgtggatgtagttgcagcggtaggtacttcgattttgaacgttgtgttctgaaattgcattgaatcaatgttatactcactgttatacatcgaaatcgattgaatggcacatactacatcgcggaagtcagccgccgatccgggaatggagtatttccaggttgaattggtttcatcttgtaccagtttggtgctgtcgagtttgataaagctggacatattgattatatgtttgtaggcatatttttgtttgataaattggaattagtcctcgatacgaatcggtctatcgaagttatacctgatctgacccttgaccgaatcaatgaagagcatttggccttttcgctccgtggctttgttgtaataatagacgattgaacgctcatctactcccttgatatcaaaatctttcacaaccatctggaggtctagcttagaattagctttcaggatcgctacgtactctgagttcaatctgatcatcttgtccgttgcgaagtagctgtggctcaagaagatggttgatagcctgaagtggcgccctctagtgaagtaatgtgagaacaaattcttctgaagaagcctatcgttgctgtagtcatcgatgatgacgagctcaggcttattggaattaattggtgtatgacgtacccgttcaacactcggaggcgagtcagggtcggtgaatgtgataaagccatcaagcttatcacgaagatactcatataactcctggtgaggattacgagcaatgatcgttagatgagcaaatacgtgaggagaatgcttgaggatgaacatacataagttgttcttctgagaacgatggccccagaaccaccattctaaacagcgctttgatgtcaagtgctggaatatcacccatagaggcgcttttgaatttttttagggattgaagctccgaaatctggaataccgcccatgattatcgtcaaaactatataggatcaaacaaagatgagttcaggtttttcttatcctagcccgatattcacatcgccgatttataatccggcattctttctccaattggatgccagcgggtttctaacgtatgactatgctcagactctttatctgaacaagtatgactatcgcttgacgtacattaccggtgtctctcaaggcgtagcatcacctggtgtagcgcttgtccctggaagtggtgggaacatcagcggtcttggagcactaagctgtagtagcctaactgttaatggtgcttccgtttcaggcgtaccaacgtatgtagctgatattactccaggtactgccgctatcaacaaagctctggtgcttggtgcatcaggtgaaattgctactactagtagtttgacggcaacgtcgattactggcacgctgcagacagcggctcagcctaatattactagcttaggcacgctatcgtccctcactgtgagtggaaacatatctggtacattggcaactgctgctcagaccaacgtaactagtgtagggacactctcgtcgctcaccgtgagtggaaacatcaatggaacgctagcgacggctgctcaaccaaatatcaccagcttaggtacgcttactgctcagcctaatataacatcgttaggtactctaaccgctgtaaattgctcgggtaatgtatcgggtacgctaacaacagctgctcagcccaacattaccagcctaggaaccctgagctcgctcacagcgacgtcgataacaggaacgctacaaaccgctgctcagcctaatattactagtctaggtacgcttagcaatctaacccttagcgctggtggaaccggtttattcattccgaatctgaaattttgggatggagtcagttcttggatgaatttcaatcatgcttactttctcaatgttatcgaagggggcgcttcagccagtagcgttgtggttctcaatagtacgaaagattactcaggcattcgcgatctaaccatatcacgaaactttatagcttcgacttcaatatcatcgcctacgatcacatgtgatacgattagtaagtcaggtactcaaactatgaatgcaacgaccttgaatatcaatcctactacgcttcaactcaggggagatactctcaatgccacaggtgcggagctgaacgagcttgctggatgcacagcatctaccgttgagctgaactatctagatcttaccaccggagcaggaactgcagaagcatcaaaggctcttgtactagactctaatagtagcatctcatcaggtatctcatctctaacgtcaaccaatctgatatccactacttctacccaatgtcagattgcggccgggacatcatttacatcaacaacgcgtgcctctgattttaatctcatgattcgtaatcaaagcaatacggttggcgctcaggccggattatcgttcacgattgaaggtactagtgatatgacaacgtacacccctagcgttaatctatattgtacaagaaccgctacgagtcttcaatattcaatggctgattttgcaatcagtacacggtcaggagctaatgcattatcaccaatgactgaacgtatgagaatcactcaagcaggatacattcgctttggatcagctaccagtactgcaaaaatagatatagtttcgagcgcgaatttactaagcgggtcttggcaacgtgcaatgcgtatagccaacgatgctactactccaatcgaatttgaaatttaggtatacaacgatgtcgcgggaggaagtagtggtgtagctctaggcaccactacgagcaacccgctaaggtccatggttggaaacacaactcaagcttatctaaacagctcaggaagactgggagttggtatgagtacgtggtcgccagaagcaaccattcactcaggcggagaggtatgggcgaataatttcatgcacgtaaagggaggcggcgatggatttgctaggtatcgattcaattggtctcagactgactatccagcgattggtactgattcaaccgtaggagctatcaggttgggaaaatgcgacgctaattacgcgtggacagcctatgtcccggtgcgtggaggaagctataccaatgcaagcgatgagaggttgaaggcggacattgtagactgtccctatggtttggcaaaccttatgagaatgagacctagaaaattcaggatggttcaagagcagactgtccatgttggctatatcgcgcaggagctgtataaggtcataccagaagtagtagatatcggagcaaacgatgagcttaatccggatgggtttccagtgaatccatggggaatcgatctcgccagtttaacctcggtactgtgtaaatctatccaagaacagcaaggccaaatcaataatctcaaagctgaactcaatgagttgagagcgattatgtctgagtaagtatataatggtatctgtcaaactcagttcgtggcgaagaccgcttgccctcagactactaacgctaatgtcgttgatactgatcaactacaatgtgatcgaattgtcgaattccacgagagggttatatatggtattggctcagggataatttcgcaccgataaatatagagcagatcttgagtacttcgttgtaatagagtattatgggctacggaccaagtaaaacgatcaaaaaggacctgactaaccctgaaactggccaagtcatcggttcaataacgatgcacgctggagtggtttcgatagggaataatgcttatatcccaatgtacaacgtacatagtggcaagaatgctgtcatggctatcgatatcggagataaaaatcaaactctatcgagagaagaaaacagacgtagacatcaaagtatatccgctctgctatatagagcaaatgtcttcacagactttgactttgtttggctggtaagcccagactcggccgccttccgtttgggtagatgcctccaccttcttggtcgacttgtcgaggtcagtagcccacacagcggcttgggtcttctggggacgatcatgaatgatgaggttcttcatgatagctttcaactcagcgactttgaggtcgctattgtcaccatagctgcctccggaactggatataatgcgcgagttgaagaagaacatggttttataataaacgggtgataatatctttgagctctttatcatcaatcagtcgattgctgtacatatccaccgtgagagacttgagctacttgatgatactggggttgtcatttccgagttgtagctctccttttagcttatcgtattcagccctaagcgtagctagaggatcctctaacttatcgtggaagctgtataggagataagtaatcaatagaacctccttgaacagtttcttatcttcaacgctgagcttatcgtaagcggattgatcgatacggttcttatagacaagtgccttgatcatggcttggaggctatcactgatttcccacttaggaccacatttacgccgattcggctgaacgatcacgagttttttagcatcaaggtcggggatacgaatatacttgcttccgatctgcttgtatgtgtaggctgacggcgttgctaatccttggatctcattgagattgtaggtacggtctcggcgaactacaccttccagcggggcaacacctgcaccgcgcaatcctcgaccttgaaactttcgtttaacgccactgccggatacctcgcttgcctcggcgtatcgcttagccttcgtttgatatatcgattttttgtcgccttcatagctgatgtagctgccttcaacaccgatctcgctgcttttgagttattccctctaacagcctcttttgcttcttcatagcgtttcggagcctcaccgtatgtctgaaaagctgcttctgactcatcatgaaccttttgcaagctggcatcgtattcatactcttcaacgctttgctgtctaatatcgtgtacagactttagaatagcctcattcaatatttcaagattagcatccaggtttttacgtcttttcttatcaagctccttttctttaagtatcttagctgcttcttcatcgctcgatgggaaggggtattcaacctcattaagatagcggtccaagtcctcaaccccgttgagtagggacgaaaaggtatccatccacatgatattcttcattagccccttccaagctacaccacccacctgcttgcgtgctttgttttcacgatttaaaatatttaggggtctagaccccgatggctgcccaaagtagtatgatggatgggacttaacaacaccgttgattttcacgattggttgtagccgaaacggaatatcaatactattagcgtgcaactggctgtagtaatcagttaagatattcttggcgtcgttatcagcgtttgataggcttgggtccatgtcttcatcaataccactcattaatccatgctgagcttcaccattagctggggtaaaatcatttatgtgtttggtttcattgctaccaactagttctaactcgaggcccctggctttagtcatattaatgaaagattggaatgtcattatccagttcactttctgagtgattgcttacttcacacgatcgctatctttcccgtaaacgctaatgctattgccattgatccaaacatagccatctttgtcaataggagaagattttgcggaaccattaagaattggtacaatcttctttatcaatccgttagattcaaggacttccctatttttgctaattgtccaaaataatttgagcttgctgtccatttgatcggatcttgtgaatgttccagtatcgaacacaaaactgtcgtcaagtctctgtttagagcggtttggataatctccttctgaggcattgattctttttctttttgagccaatattttgccaaacctagtatgggctatttttgtcctctttacccatctcattacgtcgctccttctcattgacgtatgcgaggaatctgacatcattaattaatacctcaccaatatggtcatacgtctcagaccaatcaatgctcggaactagtacatattttctcagtttaatactgtacaccttagcatccatcccaatataatacttagtaagctgccggctgttggaagcaatagggtgagtatttagttctgcaaggatggggtaaacctcgaagattttagcgaccgcttcctttgactttgtttgatttttcatctcagcattgccttcgtcgaacaaatcttcttcgacgggcttttgcggcagtggactatcagggccaacactagcatctgtcattcttgaactattatcaactccaacatcagtcatatcggggctcacgtggacccaaccatcactggttttgggcttagcagtactggaagcatcaacggactgaggctttgcagtagtcgatgcatcgttcatttcaggtgttgcattaacttcagcatctaccattgttgaggactcaggttttttttggagttttcaatattcagacttttttttaactcttccggcgtagcctcgtcagggccaaccgaaatatcagagtgagcggattgtgttgatttctttggaacagtagtgataccattcgcgatatcgctagcccatgatgcaccttcgtacataaggcgcttggacttggcttgacgaactcggcgctcgctcgttcgagttgctcctgccgcttttgctctcgttgagtgagggatgtaaagttgggaaacatcgtctaactatatcatggtagtcataaaaaaatattagcatcgattaaatacatactcaccaatagcttggcataacggagtcatgcctaaatggtttatacgtatgacagatacggtttcgctcattgaggagattgatgtatcgatccttgatgcaatgaaacggcacaccaaatatcgtttctaactggtcgcggtactgtagattgcacacggttttccggaaattggctactgggtctaaatctctgagttcatttttgattcgactaacctcttgaattatccacagctttcttcggagctgtacaagctcacgttgattctctacgcagttgcaacgcattctatatatgaagtcatatatttttaagcattatttttggaaaatagattgatagatatagatgagtcaacgcttaccgaggattgctctattaaacttatttcgaagctagttcgactcattatttatcgacttccagtactcattctctaaggttgatctcttgttcttattgactaatctaagataatcttgtggctcccaggagtcaagttcattaccgacccactgaacgagatacttggacttgccggatcgcatctttttgtggtctaagatcttctccacctctaaaatatcacctctgttgatagtagcttcagatgtttctgctttaacaatttttagatcgtttggccccttgtaaagagtgtgtccgttttttgacttgatttggatgcggtagccatcaatacctaccaccgaatacacagccttagaccatcttgctgcttctttatcaaatgttttcttttttagtcgatacaaaaccttttcaccgacctcgaactcgttttcaatcctctcggcttcagcctggttgtggactagttcagattcaattaccttacctttagcttcgttgggggtcataccaatcgtccgatgggtcgtgctattgtagttgtcaataacagcagctatgagcttttgggttagtcgctttggttcgattttgacaaggcgctgcttcagagttctattgaagcgttcaattttacccatttcggcgtgatctccaggctcattgttgaaatggtcaattttcttagctttgaataatttctgaacctgttggttcatgaattctaaaccattatcggttgtgagaatgtcaaccttatggaggcggataaaaaccctaattgctgctagtacggtcgggccagttttgttggttagtagttttgcgtagcctaggcgagagttgatgttgatcgcagtcaagattggtcttttctcccaaaacgccaagtccatctgccacgaattggggttagtcgatgcgattttgaacccatcgtatcgcatcttctgctcctgaaatcgctgaatatcgctctggtttgagtaccattccttgacgatttcatcgtaatcttcggctccagttctttagccttctggtataaggcttgggcacccacatagcccgttgtggggtcatagtataatttggacaacagctgatccatcgctctatatggttataaaacaaaaaaatcccctgccaggtagttgcttatatgtcgagcggttcggtggtgataccatccgcaagtacacgacgcttgtcataatagtagtttagagctgttttagtctgggtgtacgtaatgattgacttactctccttactgagtctaaaccccttgttggtgccctgtagcgtgatgcgatcgcgaacaactgattcaaagccatctgggttgaggacgtcgcgattccggccatcactctgctggactcccttcgctgaaaccttgaccttgtaagattcgtctggtaggtagcaaatgtagttcttagaggacaatgataccatagcatcaccagaccactcatccttgaacaaacctggcgttcggcgatcaaactgagccatctcttcgctataatcacgtgggaaccactcgtacttatgctgctgaaaatgctcacgaagatcgggcttgatacactcaacgaatggcttctcacagctgaacgcaatataagccgagtctgtgtccatttcttggtactggaattccgaacggtcgaagtagaagtcaatgcaatcatagtagaattgcaacatacggagcttagcgagctgatagattgcaatcgatagatgaattgggttcttattgttgagctttcgcttcttcatagtgaattcacatgaatcattcagctcttccattccatggaaggtgaagtgctcaatcttggccttgattgccttatcgtccgactcatacctgacctccttgtgcttgctcatgtccatgccagatcgtccaaacgcactattaccatccagtttcatcatctctgcaatcatagccttattattgctaccctcactaagcgttttcagcttagtcaacaagtctagaaccaaatgaatcttaggattggttgtcgattcattcatgaatctatcgataatgagcgcatcaaatgatttagggttcataatgatttttttcaactcttggactaaatcatccatatcagagtcagataccttctcaataatgatcttacagatggatttaacattttcatcaccctctcgtcgcgcgctcgatacgacttccatgaatggtgcaaatgccttgtgagagctagccttgatgaagctgtaagtcttggcgatctccataccatgagaaatgtaccatttgagtagcggtgcataaatgaggatcttctcaccaaagtagctcccgatgagtttgcgagccggctttgcttgcgctcctcgttgtactcgaacatgtgctgaccgatgacactccgatcgctgcagtcgataagggtgttcttgaaaattggggtcatttcactgaagtagggtttgaggtgctctggtgtacggatatcacactcgaggaagccaaagatcttgtcatttacaatatcatcgacgatccctgtgtatgcttcgatggtagtcagccgttcacatggcatctcattaccaagagcccacaaatacagagcactaccatcgtagccgatgatctttttgcagatcctaccccctcgaatcttggtctcgttgcgtttcgcgtatctgttgaagatgatagaaggaccaccagcaatgttcgccttcatcttggtgtagatgtccttctctctatcgatattgtacaccaacctgtctgagttgaattcaagtagcttcttgtggcggaagccctttagcgacatgttcttgcgagcaacgttgcatcccacacagctgatcaagatattaccatcgatgtgtccgagcttgttattgattcggtcagccgaggcagtatcagctgtgagttgcttgtagcatagcccacacaggtacttttgtcgctttagcaagtccttgaggtgttctagcgtcatattgaattcacgatcggcatcagcatcctgggtcttatatccacttaagcgactagcgggaaagtcaaacgcttcagcagactccttacttggtcgctggaggttgttgaagcacgtctgatacatgactttctcagagagaccaggtagcgacacaacatcagtgaacatatcaagttcgaaacctttgaatagttctcgctgggctttgatggccttgatgaagggtactacatcgaggttgttgtaccaaatgagtagatccttgattgacttcatgccatagtgttcccagacgaactgtaccggcacatagtccttatcgctgatgctagtgctacgaagagcactgtcgaacgccgacttaggagggacttccggctgactgagtacgtcaaatgaagtaatgtactcgtacgggaagatgccttttcctaggccacagacgcatcgaatcttgtcatcacacttgcactgtcgacaagtactttgcatagctggtgcttgccggaacatagttgctaatgtcaagcattttcatgtctgatgtggcgatgcacatgtagctagggttcttgatgactgatgtgatgttgtcagtaccgatgactgcaaacaggtccgccttgataaggttgatgtcgtagcgtccagagttgaatccgaatactggtacctgaccaatgcactgcttcagcttgccataatccgagcgcttcttaccgaatgtgagcttgctgtggaaatcgaagaaacaagcaaactccccgttctgaatccaagcattgacatcatccatcttgtacgtcttacccaagtctagaccaggaacctcagcgtcagtcaaaccatggacgttgatgattttgcggagcaaagactcgtacttcgaaacgttgtactgctgaatcttagccgcaacttccttgatgtactggaacatatccttgagcaactccgtcgggtcatcgctgacaaagcatcgcacctcctcagtcaagctgtcggccacggaaacagacacaggaatgtgttcgtttgtgaagatagtattctctccggttttgacacccgtagggttgcggatagcctcaaaatcatagacaatgaagtgatcgatgtaatggtcagcatccttgatggagtacttagtcagcatggaacgaatgctgttcggagcgggttggtagatggttggctgagctgggaaggattcgatgttcacgagttcgcattggttcttagtgtggttgcgtagcttatcagggctaacaaacaccatctcacacgtagagcattggtacttctgctggagcatatcaacgttcgtgatgtagagagcgtgattctcgtgcgacaggatgttgatcgagtcatagtccttgtccgagcagcgaatgcattcaaccttgcccgtctcaacatccatattgaagacgttgatgttcagcttgaagcactcctcaagctcatcgaattggagaatgtcgataggcttgaaattgcggaacagacccagagtgtaggtgatctccttgtacgaacagtactgcttgaaggcttgtttcaccagagcctggattctgcgaggaccctttttggctccctcctgcttgtgataagcaatgcagtggaagacacacttgttgttcgtcttggggaagctgatgacgtgcttgttatcacgaatcaccttaggaatgaccgcctcgctatcacccagagcatggtcgcgttggtagatatagattttgaagccagtaatccacttcaccatgtacccggagctggggtagttgagcttgtcagccaactccatggagcgaatctccgagatcaccttcttgcgaatatcagccttgttgttgatagctacaggagtgctaaatacagacgtgttgctaattttcgggtggaagtagcgagtatcgctgtcatcagttctgctgacaagcttgtatccaagagcgatgttgaccttgaaggcagacttctgggttgcgagcacgttctcgagcttgtcgtagaactcagcaggctgaattccctcgtagaggtgcgactccatgttcttgccttggtagaagcggtacttactgtcttccttgaaatcagcagccacattcttttggagcttgcctagactgatctggtactgcttcgctaccaatttttggttggtggggtgggaaatgttgctaatgtataccatgcgccccgtcttgccacgtaccttaatacggtagctactaccccatcgaatgggttgaatatttaatctctttaatccttcgagttcgtatgcaaacatgttgcctatatatgcttgactatattattctccgtagatatgactttataattatttgaccttgtatcaggatcgactttatatcttagtcatttacaaaatattctgaaattaattaattcaaatatttggcttatacctttttggaggtcttaagccattgtctttgactatattgggattaactttttgagaaaaaattaattaattaattaagttcggtttcattattaagttcgacttcactatcaataagttcggttttggacttacgcttgcgagctcgaatctggtctctattcttgtcatcgtagtcttttagataagataaacgggcttcgcgtgcgctggtagtagcgcttctgcgctgctttgatacgttccttgctagcttggtattgctcaggagagtacgtcatcgttgtatattagtaactttatatttgtcaggatcgatcaacaaatacttggtaattgagaagttgaagacaccatgcttccattaaattattcatttcctctttcctcctcctctgtttctctttgtgctctgtgagggttgttgttgttgaggttgtcgctgagcttcagtagcaggaagcagcgaagtgtgctcggtcaattcttgatgctgggcttcagcagcaaaagtcaggtcggtcatttcttgtcgctgggcttgtaacggtgtctcgtccttcgcttcctcgatcacgttgtcaagcttcgatttccaatgttgcgaatatgacagaatcgcccccatcgcaatatcaacaccaatcatctgacacacgataagcgagcggccaggaactgttaaacatcctttttcgtcggttggattctctccataggccaaaacaatgaatgtaatgaccgccaatatgacaggtacgaagcattgagcgttgatgatccaccgtctgaatcctgctctacacaagaaattagcaacaacatattcaaacaattaggggccagaatacgtacgcttatatttcagcgctctggaagcagttccaccaatgtcaacgcgaacatgacccggaaccaccaccagcacgtggatctgcttcttctgcggagctggtacgaagacatcggcaatctcatctgctgggtccatttccacgttcagcagtgtcttcacttgttcaggaatgcctccacttcgcatagaaatcacatcagggtccttcgatgagagccacgcgccgtccgccgtcttcgccaggaagagctgcaggtccttggcgtcgcccgtgatagtcgctgagttcttcgccttgatcgcgtccttcaagtcgtccaccgtgtcgctctcatctactcgcaccgagaacgcgctgcccgccacgcccacagaagagcttcatcatctttcctcgagccggcagattctgggatgaggaagaaatttctggcgtacttaagcgggcatgaaggtgtgtgagatagattttcaaccaatgatgagacgccacgtcgcgctggtccgaactactagtaaaatctgccggcgtaatgttctattggttttatcaatatagtttaaacgagcggtcccgaaacgccctaagatccaaaagacgcggctctcgctataaagtgggcgtcgtcaaatcaacgtctattagatctgaccggttcagaggttctaaatctaccctcatatcgaaaagacgtggctctcgctctcaagtggtcgagaggggtcgtcgttgaaatcgctgctgtcccgaaagaaggtttcaggaatgttctcggtggtaaattacggtaaggaaaaaaactgccggcgtaatgttccatgacccactactttcttagactcaccctcttgtttcacccaggtgaggctgtgcgctatttgtacgcgcgcccaccaccgtgatatttccgtcttccgccatcgagttacatgaaggacgaagtgtataatcgcctttaattggactcttcccaacactttttcatcatccgagttcaagactcatgggccagcctgacgaatggagagaacctgtgtacgtagttgccgagatgtccgcttccaagaagagcccagtagctccgcctgtggcactttgcgcacgtctggagaagaaatgggaatccattcaagtcggtcgtcagggatcttactccattgagcggctcgaaagcttggaccgctactgcaagacgacgtcggggactcgagttatcctcgtgtgtgcgctcaccccggtccaccttcactgttgattgcggtgctagtggagtgcatgccgttgtcacctccgacggaagggtgggaggccaattgggtcttttggcttcgagtggtcgtactcataaccgcgatgctcttcgccgtgttctcgtcgctgattaacttcgtcccggaactgacctacacactggcgaaaagactccttgtatcggtggctggagctggtgccttcgtgaggttatgtctaattacttcaagccacattggctttcccgtgcctttcgtgtggtatattgcagatttgttagcaggaatgtatctggtttcggtgattctgatcgtcttcggcggcaacccattcatgaagcaatcacgcgggtgtcgcaatctacgacgaaattaccggtacttcactggctgcatggggctcaacttgtacttcggcatctacaagtccatctacaaaggcatgcccgaggcctaccgtggcggcgtgattcttgtgttcccgctgtggaaattcgccggaaagcactttatcatgtgggtgatgcgcgattttgaggactatttgcctgagatcgtggccctgaccgtggatttcttcagtgcgatcttcgtatcagtgtgcatctcgacgtcgcactcggtgtacacatcggcaatgttcatcgccttagactttgtgcagagcgttctggagtttagggagttacgcacaaacgcaagaagtgtgctaagactgtttcaagaccgacgagcctcccatgaacgcctcaactccagaacgaacagaaccgcgagtgacttggagagcttcaatctgttcacgatgatgctcgctgtcacccgaaacctcagtgcatttcaaatgaaatctctgaaaggcgtccgcttgtgggcgtgtctgcctcatcctctcaccaagcagcaaatggagcgacttcaaacgtttgaagcgtcaggaatgttcggaattgaaccgcagcctgtaaagagcaattcgaaccgggtcttctggaagtcgagtcgccaacgaattgcagtcggactgacaccaactaagcaagtttcgccgatatccgagactcaagacaagaagacaaacgcgaggcttgctgcgtctatcgacaagtcgaaaaggattattttccagggtcttcagctgctgttccactgcgaatatctcatcttggtcgactacattgagtgcatcatctcgctcgtgtttgtgatctaccggtcggttctggtacagctgccgaatatcatctactactcggctgaagtgggaaactgggactggagttccgtcggcaatattatgctctttgtcgtgatggaagtggcgtcgttggctctcttcgaacggtacctgcgacacacgtttgcgttctcgccattgtatcagcttgcatatgtgctggaaacgcagatgtacctggtgcagagcagtctgtggactgtgatcctaacgttgatgcagttcgaactcgtccattcgggtaacgtgctgtgtgtgtgtgtttttattttacaaggacacgggatttttcaagctttccacgactaatattcgggttatttgtttgattcggagcaggaacggactttacctttcggttcgagtgactccgtcacggaaacccttgaggtattggtagaactcactgttacagccaatgtgacagcatagcctactcaagatggataaacgataaccgcataaaaccaaaatctgcgtgtcgaacattttttttaattgtattttgtttgttggaggtggctctttggagctatttccgctttctcataacggtagtttgggtacagtgacacctctataaatgacacctagttcgctcctccagcattttcgtactcttgttttgtttcgtcttcacacagacagaactaacggtaggcgcggtattgtctgttcctactccttctcattggtattagcagaatcgcatcccctcgggttgtacgtgagtttcaatacagtggggttatgggaatatttgttgtcccgatatacctgccaccatgcctgcagttttatcttttgcttggtatctactgcatagcccctagttgtctcgacatcataatattttagttttcgtaaaatatatatgtacgctgcgctgattgtaaaatactgtggctagcttatttatcagtatttacaagttgcagttactgcaaactctttgtcccaacttagcatcccaaataaaatttctctcttcgctcgatttgttgtggcgggagtagtggtagcaatggcatacgtgggaggaggcagacaagtgattgagaaaaatatatgagtttggatctattactacggcgtccatttagagggttgaggcgccaacaatggcgaccatttagagaataaagaggtttttgatcagttatagaacacctatagtaaaatccatataatcccgtttgcagtcgaggaatcctaaccagatagggaacacatagtcagttagaggggttcatttagggaggtgtcactgtagttttggaggtaatccattcagagagcactcgaccacgtgccagaatctgcggcgatactaccgctacttgttctcgtatatggtgcttggcgcggtgtttccggtgttataaagttgagtacaacgaagtccccgagatgtttcgtgggcgtgcgattattatcctaccggtgtggaaactggcagaccaacactttatgatgtgagcgacgcgtgacctggaggatttcgttccggacatcgttgcgttttcggtggatttccatatcgccttgttcgtcgcgctgttcatgtcgaactcgggctcattctcgacttctgcggtgattatcgctgtagatttggtgcagtcagtgcttgatttccgagaggcgcgctcaaatgcgaagcgtgagctgctgctgctcagaacgagggatgacttgagaaggagcaactatttgccaagatactgcccattatccacaatttcaaagcgttccgcggctcatcgctggataaaacacgactttgggcgtgtctacctcatcccgctcacacgagaacaagttacttaagtaagctgctacaaacgttagggctgtcaaaggtattcagggtcaggcggcatcattcaaacagaggaacactcgggggcttctggaattcaaacgttaaaagagtaggcgtggcatccccgacgcaaaagtcgttgacgtctgtctccctgccagatactgaagacactagcctatgaactcctaccaagtctattgagaactcgaagagggtcctcaactgctattccattgtgagtatctcgtccttgtcgagtacatcgagtgcattgttccgctcggcttcgccatctacaggtcgacaatcaaatctctcccaaacatggcattttatccgcctgatgtaggcaactggggggttaactggcgttgcgaatgttctggtgtttgcattgatggaggttctgtccttgattcttttcgagctcttcttccgccgcatattcgcctttctccccatgtaccagcttgcgttcgtgctcgagactcaagtttactggatacaaggccgattgtgggttatcacgctaagccagatgcagttcgaacttgttcactctggtaaggtatttacttgcatattatattgccagcttagttatttttctttctctaacggatacttgatcgttttgcacaagcaggagctgattacacatgtcggctcgaatggctctatgaccacagtcattgaacaattgtgatacttacaccaagctgatagaaatccttatcaacacacacgagcttttagatttaaaatcatatcttaacaaatcttgcccctgtatatattctaaataaatcgatgtacatgttgtcctcagaacgagtatatttcttaacaaatatacttagtgcgtgtgctaaatatataaaatgtgtgaaatagtcttagtttgcacaagtatttcaagctttcgtcagagtttcgttgttcattggagcttcttctggtgatagcatttggcgcgctagttgacgtgtcgatgatgggccgcgtggaggaacagagagaggctgagaaagcgctatcacccacccgagtaactcgagcagctcgcaagttcagccccttcattaaactgctcaagcgtctcgaagatgaatgggagagaattcaagtcgggcggcagggctcctactccgtcgagcgacttgaaagtctgagtcactactgcaaaaccacgtcgcgaactcgtgccatcttggtatgcgtcgtcaccccactccccgctctatccgtggctctcttgctcgaatgcatgcccctgcgaccgccgtcggagggctggagggtcaactgggtcttctggattcgcctcgcaatcctgatcttcatcatgatctttgctatcctctctcagctcgtcacgtgcgttccagagctaaaccccacgttagcgaaaaggttttccgccgcggtaattgcggctggcacctttgttggaatatgtgtcacaatagcggaaaactacggcttccccattgcgtttatgtggaacatggcaaatttactcggaggggtttacctcctcctggcgatccggttcgtcttcggcggcaaagtttttgggaaagactcgcctctatcgctatttcttcgcctacatggggatcggagcggtgtaccccatgtacgaaggggtatacctcagtgtgtccgaaaactaccgcgctggtgtgatcctcgccctgccattgtggaggtttgccggcaaatatttcgtcaagtgggcggcgtacgatctggaggatttatccctggaatcgtgactttctcagtggatttctacaacgcgctcttcgtatccctcttcatgtcaaatgcgggctcgatgctcactaccgcgctattcattgcagtcgatttggcgcaagttatcctggagcttcgccaggtgcggaccatgtgctaaaacttcttcatgaccgccgagcctcgagagaggaactgtgcagaaccaacagcgacttagagaataccggactggtgaagatcgtactgggggtgactaacaacctcagtgtattattcgtgacgccgttgaaagccgtccgattgtgggcgtgtctgcctcatccgctaggcagcggccaaaaggagcaactttacgcgtggaaatcgtcgggtttgtttgttgcccaagcagaagccaacaattagaagaaaatctacttggattttctggaaaccaagccgccggcgcattgaagtcgccccagcgcgcaatcttgaggagaaatttactgaagcgcacaaaaatctgagtcccagactggcggcatcaattgagagatccaagaaaatcctagctcagggcctccaactgctattccactgcgaatatctcgtcttggtcgagtacgttgaagtgataattccgttggtgttcgcgacctacagattggtgctcgtccacctgccaaacatcgtgtactacccgagtagtatcgccaactggggtctgagcgctgttggaaacattgtactgttttccgtgttggagctcggctcgtttgcgttcttcgagagtttttttagacgaacgtttgcgttttcgtcaatgtaccagctcgcatttgtgctggagacgcaagtttatctcattcagggaagtatctggctcgtcctgctgagcctcatgcaactggacctcgtccactccggtacgacgctatgtattttgtctgttgtgcgctcgaatacgtaaaaaaatctaactactgtacatcccgtcacgacaggaaattcatcgtgaaaactacatacactagcgccttgttggcagtgaggtattgccgtttgcagatattttggccaacgcatgcttattatctcgttaataatctcgattttagtctagcaggctcttaattaagacctaggtctgatttatatatatcgccagtacaggtctaagatgcaaggttggggtctgtttcatgctttgctacgacttggaaacgcagaaatgccattctagacgggccaaaccgagtttctgcgcctaaaagcggcccccaccaaagcataaatctaaatcagccctcgcctatctcgtgtccactcatattaagacaggcgtggtctattttagagatctattttagagggctaaatatttgcacatgtactgcaagatcgcaatgacgaatacctattacaagtatacatgctttaggttgagcttgagacctgcgcagatgtttctcgcggtcattcttctgcagggtctgcagggtacttgcaaactgtctttcgacatcttcgagcctcgaagacgtcgaaagacagctccgagcccaggcgcaaagtgtcacgcaccctcccggtcgggatcgggtaccagcgggctgattggggagtgcggcctctgagtggggcgaggtcggaaagagctggctgggtagaagtagcaggagctgagctaacgtaaatgaaaagtgtctcttggttagcttgtgttgttatcgggaaaatgcgagactgaaagagctaagcgcccgtcggctctggccgggaacgctcataagcacgacgcctcctctcctctcctctcctcacctgggcaccctggcgtgccatccatccttgacgcgaccccctctccactaaggcttgaacagaaccgcccggccgcgcgacctccctccgcgacggctccatgctcctcacggaagcttccacgacgaccagctggcctgacttcaatgcaccgcgccatcaattcgacagtggctcctcacgcgagaggacgctgtaccgcagacttggtacccaaagtgtacccactatcgaccgtagcgatatccagcagcggagtggtatcgaagcaggctcgccagcgaccctcctggttcgtgggtcccaaccccgggtacgggaaaaaaggaactgaagagcaagaaggggctttgtgaggttttgctcaggttcgtcgatgtactattccgttgcctgttcgcaatcgcaaggccacccgctggcaatgctgcagtgcgatcttcggcgacggatctgctcccggatctgaagttgaagcggcaaagcccgcgagccgatcagcaccaagcctttttcacggcccacgcgctcgaaatactgctgtttttcgtctcgcagatctgggattcgcgccgactgtcgtcgacattattgaatgagtcaggccctggccccctcgacctttttgacgagaagaacgccggcacaagtattgtgccacagcgcccagagctcagtcgtccattattttttaaaaggttgtatgcatttttctttctctattcgcgcatcttccagtagtaagcctttcgcggctcgccaccggatcccgtagaggtcattttgatcgactatgcgaccgcattgctaagataatatcgattactcgaaattttggctcgcaaacggtcgaggagcataactgcaggctccactatttgatcgcttcgatgtcgtcgctaaccccccccccccccgctacgactgagtacgctgtagaagtgagttttcgccaatacccgtcgtggtgccgatcggatggcccccttgacgaaagtctatccctgcgtgggcactttgtttaacggcgctgctacatgtacatgtagtgaaggtagccacttcaagctgggagcttgaagcgaagtagtgtaccaaagcaatgcatcatgccatccacgatttcgcgactctcgaagtcgacaacgctgtgagcggcgggcgactccgaccaaacctttcgtccgttcagaggtcgttttgcctttacgaacgcatggcagtggatattcacggatattcacgactgtcttcgcgttattgggggtagtcagccgtgtaatgaaggtaggcacatgcaggtaggtcgatgccttccctctgcaagaattcagcgacccgcgtgctctcttgcctgggacaagcaagcaggggggtaatacagtacagtccacgcaatgccctatggcacgacactgctgctgttagtgctcggtagtcgtggcccgttgcagttttacacgcagtaatggcttgggcttgtggcgctggcctgcgaaccgtggtgcttggagtatcggagacgacagtatccatgtaggagccatcctgagctctcctttggcaccgagtcccgctccgtgcgttgcacttgtattatacgtgaggtagccgctcgatcggacggtgtgggttgtatgtagacacctggcgaccaacttctacatgagcttaaagcttaacgtaaccggtggtaaggcattgtctcccggaggggttctatccacgagcactcggccatgtgagactcgacttctacgcgtaaggtcattcatgcgtggacgtccacgagcggcctggcagctgcacgaaagataagcggtcggtgcccagcaacgcaaaagtatcggccgatctagtacgcacctttacgatccaagaagagcgtttgactttcgtctcgccgtgctttgcatcttcctcgtggacttgacacctcaagcttttgggccgcccgattcacgtgcggcaaataaagacgtgacgagcgagcactttgggaccacaaaggctggagctggcgaaatgccgtcctgctgcacttcaacttcagcgaactcggctgtcagctcagccagccaaaggcggcaagttactctttgccacgccgggcttgcgtacttcttaccataaagcccagagctccactgcattatttgcgtccacctgcggacactttggcacgcgccagggcgagcgtttaacagtgccaacggatctgatatcaattgaacgctattgcttccgtccagcagaccccctaaagctaaaatcgaggggcagtggcaagataattcaccaaaaatccgcacgacattctctaacctagatacatcttttgccttctgaccccctccctctctctctcttacctcaacaccagcaagtgagccttggcgttctgtagaagcgttttcacggcgctggcggcgcgctccataatcagcggcaagtggaagatgcaaatgtggacgacgaggcactcgccacatgggtggcctctacattactctccatgtgtcgagagcgaggcgacggccgcgcttgcttatcttagttcggtggagggctttttgatcaccgtctccactcgatcgcgagccgatcccaagcccacgcattttcccaaggcgaaaggcccctattttgatggtagaagtcgtgtcaccagcaccctcaagtgcggcttgtgaaacttaatgaaggcaaatctcgcactcacgcgagttgagtcaagtgaaagtttgctacacacgagccgcttggcttcgagacactcgttggccgcaaacacatacacgcacatgagcccctgtcggtcggtcggtcctttaacttgaccgctcgctcctacactgccaccttttccggttggtcccaaatggaccgctcgtcttttcgacaaggaggcagctcttcccgagtttcagctgggcgtgcggatgtgcccttgccacgccggacgtttcgattccccaacaaaccactccaggcctttcagagaagagccctgggataaagacccgagggtgcagcagagtagcgtagaagcgatggggagtaagttcgtcccaactcccagagccattcctacttttgcctcgctgggcagacgccgtctaccttatcctacataattatgcaggcgcaggtcatgactcccccgacgacccccacaggttccgtcgcgcaggctccgcaatgggccccagagcgctgcagcctcaagcgcatcgacagctcaagttccaaggtgcaacaccagaacgatgataaccagacccaggcccggatccaatggcagtccaccagccacctgcccgaacgccgcatgatggtgcagcggatcctgcagctctcccagtcgcagtccaagaccgtcgacccgcagcgcgcggtgctgctggccaagcgcatcgagttggcgctgtactcgcgtgccggatcattggccgagtactacaacttggccacgctgcgtcgccgcctgcagagtctcgtggcctccagcgtccacgaagccgcggcaagtgagaccgtggcgcagacccacaagactctcaagcgcctcgttgtcgcgcgcgacctgatgcgcgtaaccaagcgccgacgttgcactttgagcagcggcaacagtatcttctcgagcattggtgaggactgcacgcggttggtgttttcgttcctggacggcaaggaggtgatgcgtcatcgagcgcttaaccgcttcgccgcgactttcttgccgcggtgcgtggtaagtttgaccgtggaggtgactcaattgaaccaggggctggcttccaagtcgtccatgttgcagatgaccaacctccagcagctcgtagtgcacaaggctggaacgttgtcattgtcaccatcggtggtgccaatggtgggctgcgcgtccacgccgctctacgcctggggctgcgcggagctgccgaccacccaatccaacgatggggagagcgccgtgctcggtttaagcagtgcgctaacctccggcgccttcccgagtctcaagaagttgcagctcatttccgtcttcgttaacaccatgagccgcaacgcgctccgctcgctgtgtaatgcactggagtctggctgttgcccgcaattggaggaccttttgctggctggcaacagcctcgccgacctcggagcttttgaagtggcaagactgctgccgtccgctcaagctccgcgcctcacgcgtctggatctgcgccgcaacttcatcggagagaccggacttcgagccgtcctcactgcgttggcgcagtcgacgcgcaccccatcgctgcaagtactgtgcatgggcggcaacctggtcacggacaactgcgtgacggagttgcagagtttgctggccggagccgtgtgcccctcgctgaggttcctcggactggaagacaacttcctgagcgctgagggcgtgcagttcgtccttaagaccgcggcggtgaactcgaccagagcgcgtcgagtctcttgcgaccgaggcaactccagctccgcgtaaagcgaacaacctaatagttagcaacctaaactaccctaatagaatcaaccctgtacacgagtgaacctactagtacatttttcattggattcgcgttcttcttgcagtccgttgggttccgatttttgcctgtggacgaacgtttgaagttgaactggtgcagcttccgatgaagtcatgcaaccaggcgtttcattgatccgttaagccatttttaattttttcattgcaacggtcacaacgtgaggccattaaaggtttagtacttcgtagtactaaccaagtaagcaggagaagagcgaggtgccgtagcttgagatgcccgcatgatgcaacaaacaaaggcagaggaatggtggtggtggcagtgcgaggactcaatatataagtacgaatacaggggacgtgcggctcgctccaagtttataggctgccgctcggagaagacgacgtcctctcagtctggcaaaaagctgcaagaagctggctggtcttgagtttttcaccgatagaaggggtggaactgggtggtgttggtggggagtccgtcgcaacactttcgttgcgggtcaaaattctacggcacttgatggtggacgggttgggatggaaggatgaatcactggtaatactcctctgggggcgtcgtggagacataccacccccactgcggggacaccgtctctccgtctgcctgaagcaatgccgcctccagttcactgttctccacgtccgcgctcacctcggctgggacaacgtccgactctgtctctaactcgccgaactgcaacaacacagtttaacaccacttaaacgtcagaggcggttaagtgaaaaaatccgagaaaaatctgctgtacacgtacactgaggttgcgcggactcaggttgcggtctcttgtgggcgtggacgcgccgctctccgtgctgctgcacaggtcgtcggcctcgctctccttgtgcacgtctaatttcagctcgcgctcgtcctcggccgccgccttgaggtacgtgagcacgctcacagccgtggcggcggcggcggcggccgtggccacgaccgggtgttgcctcacccagcggatgccgccggcgatctcggtgggcgtcgggaagaagctggggaccaccacgtcggacatgtcgatcgatatgtgtgtgtgtgtgtgtagtttagatggtgctaaattcgcagtgggggatgaatctcttgtttgccttggcgctggctcttgagtgttgttgctttggttgttgcctgcacgctgcctgcctgacactcactctcttgtgttatccagcggagactttgcactgttccggcggctgcggatgcggccggtttcgtcttgaaatttgtatgcaaaagaaagggcgcttcgcaccaagcgccagcacaaaaacacgtcgcaaagacggccacaaaacctgcacaaatacatccacctttagataccgataataagattaaaaaagcgatcatggcagaaaacctttataaacctatctcctgacacatctgcatagttaaaatcgatgcgattggaagggtacattcgcgcggctcgggttgaggtggaagaggagaggaagcactgcaaaaatggtctcggcgtttgccacgccggactcgcacattcaagcaaggggggcaattgcatgccgtcttgcagtgctgcctgccctgatacccactcaaacgcgtgaggcaattgtgtgatggaagctcgacttcaaaccaaacacaataatcgatcggaccgttgaaaggtcggcaggtacagtaggtacaaatatcttagtctaacgccggaattataaccgactgactgcaatgtgcaatgctggactcgactcgcccaggcgctgaggctttgatcacggtctgggcgtgccagctccccagctgtggctgttcgtggcggcaatgctcgcctcgacccagcaatctgctttccacacccccaagaacaacaacactgcgttacgcttgccggcacacatagtcccagtcgcctgttgctcccttcttcttaacattttctcaggcttgctgctccgctcgcgggctacgggctttggctttgccgatcatcgagcggtggttgaattgaaatttcggaccgccggagcttcaaccggctttgccttttgcccgctcttgcccttgggcaacggcaactgcagacttcaaacctggccttacccagccccgcccaaactcagctcatccgcctcttgagctgaagcagcacatctccagacttcagtcttgggtccgaagtgtcgagatggcttcattggcgccagcacgaaggacaggcgtgtggcgagcgtcggcctctatgctgtcgccttcacatttgctctcatgcgccattgaggacgcgatcctctagaggcgtgagggcattgaagttacctggtttgacactttagcgcttgtattcagcggaaacgcaggcggtgataagtaaaaaaaaccggtcatgtgtcgaacaccgaaaggcaacttcccgttggtctcgtcgtcggcttgagaatctcagttcgcaacagggccacatgcatgaagtccgctcgtccgcttgccctccaatagtacatgtatggtcggcttcgcgttttgcaacacatttcaatcagacagaactaaggggtttgcacaaggtcacgcaccaataactttagatgccgagttcaccaatactttgttttatgactgatagccggagtcatcgatcccaggctgcgcgtagtcaaacaatggatgtgtccatgtagtgactccttcggagccaaccccaacgtgttgctcgagaatggcaatttagttgcttatgcctcttgccgtgcctgtgtacttcgggatatttttttcatggctgatgtcgaagtaagacttgcccatttcccaaaactgtgtcgacttcgaagtactactactaactactaaactagtacatccccagtcgaagttactctttcagcgagcgaggccttcgccttgcccttctccttcttgagcacttcgtaccggctcgcgtccgcctcgatgtactgctggatctgcttccgggtcgccgtgatgtcgtcagctgagaaggcgctggatgtgatcacagcctcgagatggctatccgtcacgtccttgccgatcacgccgtcgttttgagccagcagacccagctccaggcagtttttcagcatcacctcggcgaacttcagcacgtaaacgccgcagtcatagccgttttcttggagcggggccttcacgttcaaaggcaacacgcgatctaccgcgtactctgcgcccagctcatcgccacttgagcgtcctctagtgttttcccactccattcgcaaaagtctggtgcatcatcaggggtagcattagctcaggcaatcttgtaagcataccaatttgccatacaacgtttgtcgcgtacgttctcaaattgcgaacaatggcagctttgcggtggtaggagccgagtgggtccagcactccgacacacgtgaaggcctcctgataatccaaacacgaaacaactgtgagttacgcagcgtgtagaacggacgttcactgtccacttacgttgtcgccacttggatcagtcccagcggctccagggttcacaatgacagcaagactccaatgcatactggagaaaaaaggtaaatgagcggttagaacacgcggatagagtacccattcgctcccaggccgtgtcacttactctttgttgatgggaataaatatgatcgagcgattgaaaaagttcgagcgcgaaagccacgtcgacacattcttgtacccagcttccaagcgtgctgtcggggtgggccccttccctgctcgcaaccgggagtagaagtgcgagttgagaaacagcaccttctcctgaacgacctcattgtcttgaaattgctccagcgttaagcgcctgaaataaaagcaggaaatgctcagaatcatcaaccactggtactggcagccagcgcaattcacttacttgaagtagtaatcgacgatattgtcgttcaggtaccgcttgggcttcagccggttaacatccttgcggataattgtgatgacgtcggacgtgcaagggggcagcgggtagtttagcaccgtgacgagtccatcggcatcatcatcatccgaatccggtggactggtagcatatcacaaattatacaacgtcagttcaagactcgcgcatctatgagtgacagcagcaatagcgcacctctccacgttttcacccgtgctttttcgtcgccgcgagcgccgaggagcagtgtaggaaaatggatctttgagcaaagcctgcaggtgttcttttgcttgctctttgccatctctgtgagcgagcatacaccaaaatgagttacgcttcgtaaacatcaaatacatggcacagtatacgcacaatgtcagcacgtctgcgcagccccgcaggatgtctcggacgtcgtcaagatcccctcccgtatatgttgcttcttctaacgggcgaagaatcatgtacgatttcaagacatctacgacccaatcatcatagagcaaggagccatgagtgccttaacttcaagcaataaatgttgctacaaatcgaaccacgtaccatcgtccgcggggtcgtagaaggtcttcactgcatcctgctcggtttcctccaacagcggcaacttgaatgctacgtaggaagcttcgcctagcaattgctccatctgctccgaatcaacgacctcattttcggcgtcttttgacaccttatagagtctgcagccgcacaagaaatcgatcagctccgcctcaatcacagcactcaaagacagacaagcgtacctgacatcccgcaaatgcttaaagtcaaacatatacgacgacttgaatggccacgcgtcgtgcttcccgcgaacattcctcatgcacatccgatcattctggaagtacaggtcgacaatgcaccggaagaggccgatcatcacgtcgcaattgtggatctggaccacagcgttctgggtgatatcctcctccggttcaactgcaggcggcttctcctcctgatcttccttgcctccctttttcctgtcatcgttcagcacttcttcgacaatgtccgagctgttcccgtcgttattgagttgcacctcagcctccgactcggagtccgagtctagcgcaatcggcttgtccgcggatccttcactgttcatcttccgcttgcccagcctcgtcgtccgcgcacttcgaagcgaaaaccctggcgaagaaatgggcgagagctcctgaagcagagacgagcgtcgatcgcgcagtgcgtaatgtcttgttacaacaggcggcgagctcttccgccgctcgttgtccagcttcatcctcttcttcgtcgcgtccagaaccacgcgcggcttgggcttgggctcttctctcctgttcctgctcacccagccactggacccggacggcgggttcgaaatgtccttcttaggcggcggcgcactcgcagcctctaaggacgacaccgttgagtacgccatcaaggccttggtccgtccggcccctcggttcttcatcgtgttgattttggtcaggaaatcgtcctgctccttcggtgccatgaagacctacagcaacaacagcaacggcgataaggttagttctccgtaaaaataatgtaaaataataacaataacaaaatacgaatacttactttttgcaggactgcatctgtgacgccgagggaggagttggcgttgacgatggaggagcctggggcgctgatgctctggccgctggccttgggcctggcggaggactggtacttggctggcctgttgtcgtcgtcttcgtgcctgcgtcgctcctgtagctcgtgctgcgggtcgtctctgtcgaagtggaagtcgtggcgggagtcgtcccagctgctgtggcggtggcgctgtctgcttcaggcggacggcagagtgtccacacgtgagcgacagagccgacagagtcgcagcagcagcagcagcagcaaaggaggaggaggaggaggaggaacaagaactcactctacgtacggccgcgacacggagcgctcggacgcgatcgtggcgaactcgagcgtgttggacgtgtggcgagcgtcgcccatgtagtgcggccctccgccgtagcgcgagcggggctccgggggcgcgtgccggcgtgcgccgaagcgccgacggccgccgttcgggggttccatcgggtggtgccactggagcaagacggactaaaaagttggcggtggcggactaaatggtgggtacacaagactaaatcgcaaaaatgaacctgtaatcaaaacgttatggctccgctctggcgtcttgtgcacggagtcatgacgagctcctatagagtccggtaagcgggccagcagagcgctgcacttcccgttccgacgcgcagtatacagcacagtacgcagatggggaactcgtgtcggaagaagaatgcacgcaacaagttggacaaggacttgctggaagccgcaaaagccggaagcttcgcgaggttccaggagctcgtggagcaaggcgcagacatcaacgcgacggagtccatgggagactccgcgctcgtgttagctgctagaggcgggcacactgcgatcgcccggtatctcttcgaaacacgcggtgctgcggtgcttgccgacgtcaagcaagtgactgaggcgatggcaaaggccacgaaattccgacatgtcgggttcctgcgatacctcatggctcagcccggcgtggatgtcgacgcaacgaacgaatacggtgaaacagcactgatgaaggccgctgagaaggggcaccttgacatcgtcctctttcttacagaagagtgtggcgctgacgtgaatgtcatcacacgctacggtcaaacagctctggtgaaggctgctgaaggcgggcacagcaagatcgtccagtacctcgctaagcgcagcgctgacgtgagtgtggaagacaaatacggatctaccgcaattatgggggctgttaggcatggccatatcgacgtcgttaggtaccttgctgaagaatgcgaggccgatgtgaacacggacaaatccggcacaacgccattgatggaggcggttcgattggggcatttgggcattgtacagtatctcgcggaagagcgcggcgctgacgtgaactttacgcataaagacgagcacagcggattcactgcgctgatgaaggccgctacgtacagatacgtggggatcgttcgatatctggtggagcgatggaatgttgacgtgaatgtgacggatgtagacgggaacacggccttgatgcgggcagcttcgagagggtatgctgacattgtgcggtatctagctgaggagagcggcgcagatgtaaacgtcaagaattccaacgggcgaacagcaatacaacttgccgctgaacaggggcatcaagaaatccagtacatactcacaccattcctgccgcttccggttcaacggcatatcagtgacagaacaaggatacgtgatgcagtgccctcttcttataagtcgtcaaagtgggccatccacccttctgaaatcgcgctcatgaacctttcaacaaagggcaatattggaggtgaataccgtgccaagtggcttggtgcagatgcagttgtgaaattatttgttcttgacgtatctcgctcggaatttgagaaggaagtacagctgtggggggaattgcgtcatcccaacgtgatcaagatgtacggtgcgtgtgatgcgagctcacacctcaagttcttcgtctgtgagtacgccagtaagggatcgctgcttgagcacatcgactcttcagctgggaagccgatgatttggaagttcctgcacgaggcagccttagggctggagtacctccatgagcggggaattgcccacggagacctccgatgcagtaacattctggttggcagtgacggtttggcaaaactgtccaactttgcggtgagctctggtgtggcagcttcaggcgttgctggtccactgcactggcaagctcccgaggttttgttttggcatcgttcgccatcatttgcgtcggatgtttattcgctggggatgtgcattgtagaagctgtgaccgggaagcggccatgggacagcgaagcggaacgccaagttatatctagcaagagacactggaccccggaggaaggaatcagctggtacaccgatctctacgcacctccgtgcccttccaaagatgcgcgaaatttagtggggcgtatgtgttgcagtgactctaacagacgcgtgaggatttcttctgtggtctacgagctcgagcgcttggcaatcaaggagaatgctagcaacgcccagccagaaagtgtgccttcacacacctttgacgactacaggtgggaagagatgctaaacgtctggaccgacgtagaactgttcatgaaggcatgcgagaatagccagtattgccaagttttcggcgagatcaagaatgtgcatgagcgtctgctacactcaagctaccgccaaatgctgctcgcaagatttcacaagcttctcacagaattttattggacggtcaagatgtcgcctgagcaagcacatatactgcgactatcgtcaacgcgcgcgccctctagcagcttttacgcgttcaattggcgcattcaatcgctcctagcagcgttgggagaccctgcgagagcggataaagagagagaggtacgatggcaggagcagcgcagtgaacagaccgacttctttgttgcgggtgttacggacgcatatcttctgttgcaggagttgaagtcgacagaggagcgttcggctttcctccgtcgtttgaagacacaaattgatactcctgtgtccaactacacccctgaccaactttgcctgatgaagaacgcgtacgatgatatggttagcaaactcgagacggaagattggtcgaaactcgcacccgaatggttcattccttggtacgagttgattattgacaagtggagtaaactgggtagcggcggatttggaagtgtgtaccaaggtacatggctggattcagatgttgttgtaaaactggttggtgtcgactgtgaccacgacgctttctcgctggagtactccacatacgagtcgcaggttaaaacacagatcaccccagagcagcgagcaaaagcaacgacgacattccgccgcgaagctgacatttggtttggacttaatcaccctcatgttattcgactgttcggcgcctgccacgttggaagacccttcttcgtgtgtgagtacgccaccaacggaacgctagtcagttatctacaaaaacatcccgaccaactctggacgaagcttcatgaagctgcgctgggggtgcagtatctccacgcgcgcaatgtcgttcatggcgatctgaaagggaacaacatcgtcgttgggagcgatttcaaggcgaaggtgacggacttcggcttgagctcgatcacggatagtgaggcaaagccagaggtgtcagcagcggtgcattgggtcgcacccgagtgcttgcctcagaccaagtcaaagctgcagacgcttgaaactgaaagaccaacgtttgcgtccgatatctactctttgggtatgtgcattgtggaagcgctacgagttgtggaggcagtgacacttcacaaggatgcaagtcggtgtctgccgtggggccttgctgaccaaatggcagtgaaatatcatgtccgacaaggaaaattgcctcccagacccactatctgcgacgaccgcctatgggaactggttgagcgcatgtgtgtcttgaacccgaagaagcgcatcaagatatcgaccgtcgtcgacgagctggagagactggcatatgccaacaaccaagaggacgagctcaccaccaactcgccgacggatctcgagcacgtccctacagtggtcgcagcggcgcgacaagtactgacccagctacagcagcacacagatcaacgggtagctgagctctcactgtacagggacttgtggggtcagctcgagcggatccatgggctaattgatgcttcgtgtggcgcagcaggtcgcagtgccttcagctcactggttgccgatgctgagttggctacacaggaacttccaactaggaaggcaaacctcacctccttagctgagtcgacgctcctttgtcacgccttgcgtcgtcgtctggacaagttttgtgaagcttgctttcttgacatggagtgaagatgaaacccaccgcagctaaggaagattcttgtgacgacattacacaacccgagcaaatgacatctgccttgctagacccacgataaattggctgaaagcatagcggtgcttgtacgaggtcgatctacacctggaataagttgcacaactttgctttgggggtgggcgattgttcattactctcggagcaagattgggctcaaaattgttggcgaacgtctccaatgtcgccaacaattaaccccttgtttggagacattgagttgtctgcttagcctgtatacggtcgtgttttgcgtcgttgcgagcctcattcgatcaagcacgaggctggaaatgttacccattggcacggcgacttctggaccgataagttggatatccattgagcctcagtggctctctcaaattgagggtccattgggttggtgcgacgcttcattccagaacttccaccagattgcgcaacatggcgggcgaaggcgattcgcagttgctgagggcagtgcgggacgaagacgtcgagcgcgtgaaatctctcgtagaggccggggaagatgtgaaccagcgcaacgcgtgcggcgagaccgcgctgatggaagctgccaggacagggaacctgagcgtcgttcgctttctgaccgacgccggtgccgacgtaaactccgtggattccctcgagaggactccgttgatatgtgcaaccgggaaagaccataacttcgccgtcgtccagtttctcgttgaaagcggtgcccacgtcaacgccgtggcgcgcaacaggtcgactccactgttggaagcggctggaaaaggggacctcgacgtcatccgatttcttgttgagcgtggcgccctcatcaacatcgcagacgcgtctggagaaacggcactcatgcacgcggctgaggcgggcgggatggacgttgcttgtttcctcgttgacaacggtgccagcgtcaacgctgccaataactatcgatggacctcgctcctgtgtgccacaaggaatgggcacacagacgtcgctagaatgctaattgcgaacggcgccgctgttgacgctgcggcggtggacggacgaacttcgttgctaattgctacgatgagaaacgacttggaggcggttcagcttttgatccagaaaggtgctaatgttgacgccgtggacgacagcggacagacatcactgatgcatgcggagattcagaaatgactagatttctagtaaagtccggtgccaacgtcaatgctgtgagcgatagtttagctactccgctgatgtatgcgacttgtgcggacactccgaatctggcgaatattaggtttctcgtcgagcgcggagccaacgccaacgctgtcgacaaggatgaggaaacggcgctaatgaccgcgtccgcgtatggcgatgtggaagtcgttcgatatctcgtcgatcgtggcgccaacgccaacgctgtgaactgtaagggatggtcaccgattgtgtttgcgatgggatacggaaagttggatgctgctcagtttcttgctgaggcgggggctgataccggtgatgtgaaacaacatgaggtggagatgctacgagacgcggttgataacagcaacttgaatgtcgttgagtatctcgtggagagcggcgctgacgttaatgcaacgggtcctgataaaaaaaacctattggtgcttgcagcagaaaagaaccacatggatgtcgttcgattgctcgtcaaatgcggggccgatgtcaatgttgcgaacgagacaaatgaaaccccactacttcgggcagcaaaagacggtgcatgggggattgttgactttctgattgatagtggggccgatgtcagcgttgcggatgaagacggatggacagcgctattgcatgctgttgctacgactacgttctcgctcgatagcgttcgattacttgtcgaaagtggtgccgatatcaacgctgctgataaagacgggtgctccccattgtactacgctgcagaaatcagcaacttaaatgccgttcgatatctcgtcgaatcgggttctgacgtcaattctctggatgagaataacaccgccccattgatgacagcggcccggaagggagggttggaagtggttcaatttctcgttgatgctggtgctgacgtcaacgctacagatagtgccggattaaccgcactcatgcgtgcagcggcggagggtgcattcgatgtcgttcagtatctcgcccagcacggcgccgacgtaaattctgtcgacaagaacgaaacgacgatgctgatgcatgctgctaagggcggcagtctggatgctgttcggtttgtcttcaagagtcagaccgacgctcaagctgtggacaaagacggatggaccccattaatgtacgcggtacgaagcagtagcttggatgtagtccgatttctcttggagaatggcgctgacatgaacagcgcgaacagcgacggtaagacggcggcttacattgcttccagtcgcggccacacggatatccaacagcttctgatgccagctccaatgagtaatcctcttgatcgacaatagcgagtccgaaaactaggatgtggctgtggtgtagcgggatcggccaaaatctggtgaagatcgaatgtattggcgtgacgcggggataggttgtggagcagcgcgggaatcttcgctctgcgtccgagtatacgctccgatcgagggttgttcgctccgatcggtcggcctggagtcgatccacggcctgtagttgcctttccgggtgtgttccttcctttcgtgagttgcttgccgcttcctatagcgggatcgaggttgatcgagaggagaaacgatcgccggccatgcagtatccggtcgatcgagggttcgcacacaagaaatagatcgctagagtaggtcaagctggccaatgtattaatccagtcttaaccgtaccactagctcactgtccaaagtgtcgatgcttgccgaggccaatgtagttcctgggacttgacgacttgaggggacttgtgctcttcggtgcaaattctgctctgatttatgtttagctggtgtctctctaccactaccatctcacctaccatcctacaactaaacaactactggattcttgtcctggcttcgcccccatgtgctccccatcttggctgatcggcgatcgacgatcgacgatccacagctctcgatcgcgatcagtccacttcggtcttcagccgtcccactctacgatgtcgctcgttgatcttgccctcgtgcatgacgtccttcgctttcgacatgcgcccttcacaccgcgcctcttcgatcggtgtgggacgaggcatcaccactctccatgtgtcgatcagctttgatctacctggttccacaccccgcctacgtgcgagtatcatcccggtacctcgatcgctcgtcgaatctcctcgatctccgcaatcccagtcttgttcaggtcgcccttctctcgatcattgatccccttgatttttggtcgatcgtttatgccgcctttctcagagaacaaatcttgttctcgcgcttctccacatggccttctaggtccttcgtggtcgccaacagaaacactccgcgcttgttcatatcacccttgagatgtgttccgtccagaccgatgacgtgtcggcagtgtacttgaaggcatgcccctggaaaaacgcaagcccttctgaacatgttattctcgcgcctgccaaacccgtagcatgtcttggagttcgcatcactcaccatggctagatatccctccagcttctggtaactcccgacgacgtcgtcgcgcagcgattcgagaagatcccgcttgatcttggatgccgcagttcggttcgttatcacccccttagtcatcaaaaagtcgatgatagcccgccctgtgcccgaggcccacgttccgctgtaagaggggatcaactcacgctcaacgacgcccctcatcactcggtagggcacgctgacgagaggtatctcctgcgagaccgccttcaacaaaggtatcgccctgaaaaccgccgtgtctgaagtggtcatgggccagacacatccttgttatcttccagttgttgcggatcccgtacaccgtaatgaaaaatgggcagttggcagtgctgcctggaatgagctgctgctgccctttcaccgccttgcaagtgtacttggcgtttccttcttgacgacgagagtgatagctgttgttggccacgcgaatggaaaagccacgggctcgagcaaactcgcgacagcgttgcagcagagcctttttcgactcaagcgtcgcagacgcaacgttgttcccatggtcggaaactacgccgtaagaagaggggtcgaggggatccaagccgacatctagctcaggtcgtagcatgcgcatctcgatgacttcggcgatgtccgcttcttcgacagcggatgaggtgatcatgggcgaagacattgtccgggtgaccgaaacaggagaggtggtagaggtgctgaggcgtgtagttgggtgggtatccgacaaaaagacgaatgagccctgcagtgaaaactcgcgagctaagagaacacgggctaaacgaggtggttatgaaactcctacagagatgtgttgctaagctccggcccaagatactgaaaaaaagtatgaacgtccgtttcaaaatgtacgacaagaagctcagaataccgcgaagtgagatgctcggaatgcccgtccgttttaaaacttacgagtcgtaagttattgctgtcgtacgttacaataaacgtaagagtacttaacagaggcgtggcctgctcagaatgcccgtccgttttaaaacttacgagtcgtaggttgttgctttcagacttttcaacaaacccaactgtacttatcagacgcgcggccgacgaagttttaatatagaaccaagtgcgttagtttggtctgcgtgcatacaattctacgaagcgatgatgtaaacttacacattagcattacgacactcttactctaaaaagttaatttcgtacgatattacttggccctggaaaacagttatttttgcccataaaattaacgttcaattcggatatgataaaacgttatttttgactgtggcaatctacttgcaaattgatgcattcacctacttagacttttacaaaaaggcttcaatctacttgaaacttaattcctcgcgcgtatgtcatctcctgcatgatttagcacatccagcatggattagcatccttttggcactttccgaaagtgccatttccgagccaagctggcttcgaaacacgacttcaaagccactatgatttaccactaagtacgaacactatctagtgcactaattaggagggaaaaccggttgcaaagcacaatatcatagagcacatatatatcatagagcacactttcgattatccaatgaaagccatataattcacacttgaaataagacattcaatctcggagcctgatagccgcgctcgttgcgttacgccattttgaatggcgcgaacaggtagaacgcgcttaaaaagtgaaggtgacgcgcggccaaagcagtacgagcgctcgttgcgattacttaagtacgtacgagttcaagctgtgtgtgcttcgattcctagacactacaccgatggcaaaaacggtagctaacggaaaacgccaatttgtataccgcatactattgaattgaacacttgtcaaatctagaaagatatacaaataggagggggggttatactaccaaagtagctccgacgcattcaagtctgaaatattgtgtgtagagctagctacgttctgcaaaacctctttgatggcatcctgccaacgtatgtaccagtcttcaaaccatggagacatccatagattgcgcagagttggttcacaacgtctctcatgccgttagatgcaagcagaacttagaccaacaaccaaaaccatttttctttgggtaccttacggtaattttgcgtaaagttacacaaaatgcaaacagtaccgaatacaagtgtcagtttttaaactgtggtctttaaaaagataaaaataaccggatcttgcttgccgtatttgacaaagtaatacttacacggaaaataaagggtgattttcaattttaagacatctcttagccaatcaaaagatgtttacatgctaaacttcacataaatttcaagaaaattataagcactcaacgttctatacggtttggttgaggtatacaaattggcgtaggtacaatagctttgtatactgagcacattctatcagatttgagaggaggtattcaattcgggaagggtacgctatttggcgctatccgttaggtattttcctgacgggaaggtgattcccttcatttcattttcatccgggcttcaggaacaaactttgccaggaggtctttcaccgtcttggccgcgatagttccgccagatcgaaggtcactccaggaatctcgtacacgtccatgatcttcgtgaatattaaccctatcgttaacgccatacatttctgtttgaagggacaccatacaaactttaagtaaaacggggtaaaatgatgcatgaagtatcattttgctgtattaggtttgcgaggccaactgatcaaaagtatacgtgatgggaggtttgaagcgacctttcgatcaaaaagatacgtgaggcatcattttactgcttctctgtgattcgctgcgaatcgacaaaagtatcagtggaagcagtaccgtgagaacagcaccctaacaaaactttagtaagagcggtaccgtggatcacagcgccatcttgtggattatgtggggcttttcctagttgtgaagcggcggcgccgtggtctccgatgcgacgctggcgaatatggcggctgtcctggacctggccggagcgtctccgacggcggcgacaagcacgcgatgactgcgggcatctcgggcagcaagcacaacggcggccgcagcgccaccgtgtgtgccgtcaacagcatggtctcggaggcttccgcggcgaccgtggccgtgttggatgtgatcgggggcgtctccgctggcatggtcacgaacgcgacggtggcattcggctcgggcagcgagcgcaacgacagcggcagtccgcacgcaggttgccgccggtagtagcgtcagcggcgtcgccagcgacatcgacagcagggtctcggacacgatggaggtgaccgtggccttgggggatgcggtcagagctacgatgttcgtgcaagacgttgatgtagatgtgtacaatggctgatatatgttattggctctacaggtaatgaacaatgggatgaacatgtctgacaaacgaagtatattgaatgtccctttccattctgcgcgaggtacttagatgtagggctctacaaccctggtgtaccagtatgcgtgatgaagctgggaagaccaagacacgtgaacgtcgatacgctgcggagcgtccagacagagcagaagttgcgcgggcaggttgggcggtgcccgccgcaaattgttgccatgacaacgacgtggaccaaacctgctgctgaagatgcaaagtcctccagcgccgcaaaacttgtaggctcgaaaacgatattcttcgcaaataaaacactgcacccgtcaatatcctcgcgtacggctgggctcatcgctctgaggtcggcctcgtgaatcgtgaccttggataaattcgggaaatccacgcgtgcgccacgaatcagcagtttggacatgtttgccaagttgtcctggaactcaatcccgatgcatctcccaacacaagtctccagtgccacttgtgcaaccacgttgccgatcccagatccaaagtcaacaaaagtgtcggcgattgtaagcgttggaatgactgccagtattgctgaaaccccagttagcgatatctcaccagcatgacaatccggcgcatggacgggttgacgcaaggccgaggcatacaaacttgacacagcgtcatgaacgttgccaacattatcgggagcgctcaccttgtggccaccactaagcgcgtccgtgccgatttttgatcccgaaatctccttgggaaagaatctaagctcacgccgtgtgtcctcttcagcgtctttagacgaatctgcagctgtcgctgtgtcttcccgcagtatggcatccccaaccagacagcccgccagttaattcggcggcctgcatcaacctgctcctttgccagccgataacgcagcaagtcctcttcgtccgagaagtctgccatcgggttgccacgagatctagaaatctataatgccatacataccataagatatttggtctcatacttcttcgcctgataacctaccgacctttcacaaaggtcccatccccatcaatgtactcaacaccaggttcaagacgctcctaccgccagcaaggcaactaagcccggctatcgatgccgctgctacaaacgctctcgtggcactgcccagccaacacgaaagcacccctattagcctttcgaccgcgccgaatgccaccgtcacgttcgtgaccatgccagcggagatgcccccgatcacgtccaacacggccacggtcgccgcggaagcctccgagaccatgctgttgacggcacacacggcggcgctgcggccgccgttgtgcttgctgcccgagtcgcccgccaccatcgcgtccgcgtccgtgtccatgtcggcggagacgccgctgaccacgtccaccaaggccacggtcacctccatcgtgtccgagaccctgctgtcgatgtcgctggcgacgccgctgacgctactaccggcggcaacctgcgtgcggactgccgctgtcgttgcgctcgctgcccgagccgaatgccaccgtcgcgttcgtgaccatgccagcggagacgcccccgatcacatccaacacggccacggtcgccgcggaagcctccgagaccatgctgttgacggcacacacggtggcgctgcggccgccgttgtgcttgctgcccgagtcgcccgccaccatcgcgtccgcgtccgtgtccatgtcggcggagacgccactgaccacgtccaccaaggccacggtcacctccatcgtgtccgagaccctgctgtcgatgtcgctggcgacgccgctgacgctactaccggcggcaacctgcgtgcggactgccgctgtcgttgcgctcgctgcccgagccgaatgccaccgtcgcgttcgtgaccatgccagcggagacgcccccgatcacatccaacacggccacggtcgccgcggaagcctccgagaccatgctgttgacggcacacacggtggcgctgcggccgccgttgtgcttgctgcccgagtcgcccgccaccatcgcgtccgcgtccgtgtcgccgacggcggagacgccactgaccacgtccaccaaggccacggtcacctccatcgtgttcgagaccctgctgtcgatgtcgctggcgacgccgctgacgctactaccggcggcaacctgcgtgcggactgccgctgtcgttgcgctcgctgcccgagccgaatgccaccgtcgcgttcgtgaccatgccagcggagacgcccccgatcacatccaacacggccacggccgccgttgtgcttgctgcccgagtcgcccgccaccatcgcgtccgcgtccgtgtccatgtcggcggagacgccactgaccacgtccaccaaggccacggtcacctccatcgtgtccgagaccctgctgtcgatgtcgctggcgacgccgctgacgctactaccggcggcaacctgcgtgcggactgccgctgtcgttgcgctcgctgcccgagccgaatgccaccgtcgcgttcgtgaccatgccagcggagacgcccccgatcacatccaacacggccacggtcgccgcggaagcctccgagaccatgctgttgacggcacacacggtggcgctgcggccgccgttgtgcttgctgcccgagtcgcccgccaccatcgcgtccgcgtccgtgtcgccgacggcggagacgccactgaccacgtccaccaaggccacggtcacctccatcgtgtccgagaccctgctgtcgatgtcgctggcgacgccgctgacgctactaccggcggcaacctgcgtgcggactgccgctgtcgttgcgctcgctgcccgagccgaatgccaccgtcgcgttcgtgaccatgccagcggagacgcccccgatcacatccaacacggccacggtcgccgcggaagcctccgagaccatgctgttgacggcacacacggtggcgctgcggccgccgttgtgcttgctgcccgagtcgcccgccaccatcgcgtccgcgtccgtgtccatgtcggcggagacgccactgaccacgtccaccaaggccacggtcacctccatcgcgtccgagaccctgctgtcgatgtcgctggcgacgccgctgacgctactaccggcggcaacctgcgtgcggactgccgctgtcgttgcgctcgctgcccgagccgaatgccaccgtcgcgttcgtgaccatgccagcggagacgcccccgatcacatccaacacggccacggtcgccgcggaagcctccgagaccatgctgttgacggcacacacggtggcgctgcggccgccgttgtgcttgctgcccgagtcgcccgccaccatcgcgtccccatccgtgtccatgtcggcggagacgccactgaccacgtccaccaaggccacggtcacctccatcgtgtccgagaccctgctgtcgatgtcgctggcgacgccgctgacgctactaccggcggcaacctgcgtgcggactgccgctgtcgttgcgctcgctgcccgagccgaatgccaccgtcgcgttcgtgaccatgccagcggagacgcccccgatcacatccaacacggccacggtcgccgcggaagcctccgagaccatgctgttgacggcacacacggtggcgctgcggccgccgttgtgcttgctgcccgagtcgcccgccaccatcgcgtccgcatccgtgtcgccgacggcggagacgccactgaccacgtccaccaaggccacggtcacctctatcgtgtccgagaccctgctgtcgatgtcgctggcgacgccgctgacgctactaccggcggcaacctgcgtgcggactgccgctgtcgttgcgctcgctgcccgagccgaatgccaccgtcgcgttcgtgaccatgccagcggagacgcccccgatcacatccaacacggccacggtcgccgcggaagcctccgagaccatgctgttgacggcacacacggtggcgctgcggccgccgttgtgcttgctgcccgagtcgcccgccaccatcgcgtccccatccgtgtccatgtcggcggagacgccactgaccacgtccaccaaggccacggtcacctccatcgtgtccgagaccctgctgtcgatgtcgctggcgacgccgctgacgctactaccggcggcaacctgcgtgcggactgccgctgtcgttgcgctcgctgcccgagccgaatgccaccgtcgcgttcgtgaccatgccagcggagacgcccccgatcacatccaacacggccacggtcgccgcggaagcctccgagaccatgctgttgacggcacacacggtggcgctgcggccgccgttgtgcttgctgcccgagtcgcccgccaccatcgcgtccgcgtccgtgtccatgtcggcggagacgccactgaccacgtccaccaaggccacggtcacctccatcgtgtccgagaccctgctgtcgatgtcgctggcgacgccgctgacactactaccggcggcaacctgcgtgcggactgccgctgtcgttgcgctcgctgcccgagccgaatgccaccgtcgcgttcgtgaccatgccagcggagacgcccccgatcacatccaacacggccacggtcgccgcggaagcctccgagaccatgctgctgacggcacacacggtggcgctgcggccgccgttgtgcttgctgcccgagtcgcccgccaccatcgcgtccccatccgtgtccatgtcggcggagacgccactgaccacgtccaccaaggccacggtcacctccatcgtgtccgagaccctgctgtcgatgtcgctggcgacgccgctgacgctactaccggcggcaacctgcgtgcggactgccgctgtcgttgcgctcgctgcccgagccgaatgccaccgtcgcgttcgtgaccatgccagcggagacgcccccgatcacatccaacacggccacggtcgccgcggaagcctccgagaccatgctgttgacggcacacacggtggcgctgcggccgccgttgtgcttgctgcccgagtcgcccgccaccatcgcgtccgcatccgtgtcgccgacggcggagacgccactgaccacgtccaccaaggccacggtcacctctatcgtgtccgagaccctgctgtcgatgtcgctggcgacgccgctgacgctactaccggcggcaacctgcgtgcggactgccgctgtcgttgcgctcgctgcccgagccgaatgccaccgtcgcgttcgtgaccatgccagcggagacgcccccgatcacatccaacacggccacggtcgccgcggaagcctccgagaccatgctgctgacggcacacacggtggcgctgcggccgccgttgtgcttgctgcccgagtcgcccgccaccatcgcgtccccatccgtgtcgccgacggcggagacgccactgaccacgtccaccaaggccacggtcacctccatcgtgtccgagaccctgctgtcgatgtcgctggcgacgccgctgacgctactaccggcggcaacctgcgtgcggactgccgctgtcgttgcgctcgctgcccgagccgaatgccaccgtcgcgttcgtgaccatgccagcggagacgcccccgatcacatccaacacggccacggtcgccgcggaagcctccgagaccatgctgttgacggcacacacggtggcgctgcggccgccgttgtgcttgctgcccgagtcgcccgccaccatcgcgtccgcatccgtgtcgccgacggcggagacgccactgaccacgtccaccaaggccacggtcacctccatcgtgtccgagaccctgctgtcgatgtcgctggcgacgccgctgacgctactaccggcggcaacctgcgtgcggactgccgctgtcgttgcgctcgctgcccgagccgaatgccaccgtcgcgttcgtgaccatgccagcggagacgccactgaccacgtccaccaaggccacggtcacctccatcgtgtccgagaccctgctgtcgatgtcgctggcgacgccgctgacgctactaccggcgtcaacctgcgtgcggactgccgctgtcgttgcgctcgctgccccagccgaatgccaccgtcgcgttcgtgaccatgccagcggagacgccactgaccacgtccaccaaggccacggtcacctccatcgtgtccgagaccctgctgtcgatgtcgctggcgacgccgctgacgctactaccggcgtcaacctgcgtgcggactgccgctgtcgttgcgctcgctgcccgagccgaatgccaccgtcgcgttcgtgaccatgccagcggagacgcccccgatcacatccaacacggccacggtcgccgcggaagcctccgagaccatgctgttgacggcacacacggtggcgctgcggccgccgttgtgcttcctgcccgagtcgcccgccaccatcgcgtccccatccgtgtcgccgacggcggagacgccactgaccacgtccaccaaggccacggtcacctccatcgtgtccgagaccctgctgtcgatgtcgctggcgacgccgctgacgctactaccggcgtcaacctgcgtgcggactgccgctgtcgttgcgctcgctgcccgagccgaatgccaccgtcgcgttcgtgaccatgccagcggagacgcccccgatcacatccaacacggccacggtcgccgcggaagcctccgagaccatgctgctgacggcacacacggtggcgctgcggccgccgttgtgcttgctgcccgagtcgcccgccaccatcgcgtccccatccgtgtccatgtcggcggagacgccactgaccacgtccaccaaggccacggtcacctccatcgtgtccgagaccctgctgtcgatgtcgctggcgacgccgctgacgctactaccggcgtcaacctgcgtgcggactgccgctgtcgttgcgctcgctgcccgagccgaatgccaccgtcgcgttcgtgaccatgccagcggagacgcccccgatcacatccaacacggccacggtcgccgcggaagcctccgagaccatgctgttgacggcacacacggtggcgctacggccgccgttgtgcttgctgcccgagtcgcccgccaccatcgcgtccccatccgtgtcgccgacggcggagacgccactgaccacgtccaccaaggccacggtcacctccatcgtgtccgagaccctgctgtcgatgtcgctggcgacgccgctgacgctactaccggcgtcaacctgcgtgcggactgccgctgtcgttgcgctcgctgcccgagccgaatgccaccgtcgcgttcgtgaccatgccaccgtcgcgttcgtgaccgtgccagcggagacgcccccgatcacatccaacacggccacggtcgccgcggaagcctccgagaccatgctgttgacggcacacacggcggcgctgcggccgccgttgtgcttgctgcccgagtcgcccgccaccatcgcgtccccatccgtgtcgccgacggcggagacgccactgaccacgtccaccaaggccacggtcacctccatcgtgtccgagaccctgctgtcgatgtcgctggcgacgccgctgacactactaccggcgtcgacctgcgtgcggactgccgctgtcgttgcgctcgctgcccgagccgaatgccaccgtcgcgttcgtgaccatgccagcggagacgcccccgatcacatccaacacggccacggtcgccgcggaagcctccgagaccatgctgctgacggcacacacggtggcgctgcggccgccgttgtgcttgctgcccgagtcgcccgccaccatcgcgtccccatccgtgtccatgtcggcggagacgccactgaccacgtccaccaaggccacggtcacctccatcgtgtccgagaccctgctgtcgatgtcgctggcgacgccgctgacgctactaccggcgtcaacctgcgtgcggactgccgctgtcgttgcgctcgctgcccgagccgaatgccaccgtcgcgttcgtgaccatgccaccgtcgcgttcgtgaccgtgccagcggagacgcccccgatcacatccaacacggccacggtcgccgcggaagcctccgagaccatgctgctgacggcacacacggcggcgctgcggccgccgttgtgcttgctgcccgagtcgcccgccaccatcgcgtccgcatccgtgtcgccgacggcggagacgccactgaccacgtccaccaaggccacggtcacctccatcgtgtccgagaccctgctgtcgatgtcgctggcgacgccgctgacactactaccggcgtcaacctgcgtgcggactgccgctgtcgttgcgctcgctgcccgagccgaatgccaccgtcgcgttcgtgaccatgccagcggagacgcccccgatcacatccaacacggccacggtcgccgcggaagcctccgagaccatgctgttgacggcacacacggtggcgctgcggccgccgttgtgcttgctgcccgagtcgcccgccaccatcgcgtccccatccgtgtcgccgacggcggagacgccgctgaccacgtccaccaaggccacggtcacctccatcgtgtccgagaccctgctgtcgatgtcgctggcgacgccgctgacgctactaccggcgtcaacctgcgtgcggactgccgctgtcgttgcgctcgctgcccgagccgaatgccaccgtcgcgttcgtgaccatgccagcggagacgcccccgatcacatccaacacggccacggtcgccgcggaagcctccgagaccatgctgttgacggcacacacggtggcgctgcggccgccgttgtgcttgctgcccgagtcgcccgccaccatcgcgtcagcgtccgtgtccatgtcggcggagacgccactgaccacgtccaccaaggccacggtcacctccatcgtgtccgagaccctgctgtcgatgtcgctggcgacgccgctgacgctactaccggcgtcaacctgcgtgcggactgccgctgtcgttgcgctcgctgcccgagccgaatgccaccgtcgcgttcgtgaccatgccagcggagacgcccccgatcacatccaacacggccacggtcgccgcggaagcctccgagaccatgctgttgacggcacacacggtggcgctgcggccgccgttgtgcttgctgcccgagtcgcccgccaccatcgcgtccccatccgtgtcgccgacggcggagacgccactgaccacgtccaccaaggccacggtcacctccatcgtgtccgagaccctgctgtcgatgtcgctggcgacgccgctgacgctactaccggcgtcaacctgcgtgcggactgccgctgtcgttgcgctcgctgcccgagccgaatgccaccgtcgcgttcgtgaccatgccagcggagacgcccccgatcacatccaacacggccacggtcgccgcggaagcctccgagaccatgctgctgacggcacacacggtggcgctgtggccgccgttgtgcttgctgcccgagtcgcccgccaccatcgcgtccccatccgtgtcgccgacggcggagacgccgctgaccacgtccaccaaggccacggtcacctccatcgtgtccgagaccctgctgtcgatgtcgctggcgacgccgctgacgctactaccggcggcaacctgcgtgcggactgccgctgtcgttgcgctcgctgcccgagccgaatgccaccgtcgcgttcgtgaccatgccagcggagacgcccccgatcacatccaacacggccacggtcgccgcggaagcctccgagaccatgctgttgacggcacacacggcggcgctgcggccgccgttgtgcttgctgcccgagtcgcccgccaccatcgcgtccgcgtccgtgtccatgtcggcggagacgccgctgaccacgtccaccaaggccacggtcacctccatcgtgtccgagaccctgctgtcgatgtcgctggcgacgccgctgacgctactaccggcggcgacctgcgtgcggactgccgctgtcgttgcgctcgctgcccgagccgaatgccaccgtcgcgttcgtgaccatgccagcggagacgcccccgatcacatccaacacggccacggccgccgttgtgcttgctgcccgagtcgcccgccaccatcgcgtcagcgtccgtgtccatgtcggcggagacgccactgaccacgtccaccaaggccacggtcacctctatcgtgtccgagaccctgctgtcgatgtcgctggcgacgccgctgacgctactaccggcgtcaacctgcgtgcggactgccgctgtcgttgcgctcgctgcccgagccgaatgccaccgtcgcgttcgtgaccatgccagcggagacgcccccgatcacatccaacaaggccacggtcgccgcggaagcctccgagaccatgctgttgacggcacacacggtggcgctgcggccgccgttgtgcttgctgcccgagtcgcccgccaccatcgcgtcagcgtccgtgtccatgtcggcggagacgccactgaccacgtccaccaaggccacggtcacctccatcgtgtccgagaccctgctgtcgatgtcgctggcgacgccgctgacgctactaccggcgtcaacctgcgtgcggactgccgctgtcgttgcgctcgctgcccgagccgaatgccaccgtcgcgttcgtgaccatgccaccgtcgcgttcgtgaccgtgccagcggagacgcccccgatcacatccaacacggccacggtcgccgcggaagcctccgagaccatgctgctgacggcacacacggtggcgctgcggccgccgttgtgcttgctgcccgagtcgcccgccaccatcgcgtccccatccgtgtccatgtcggcggagacgccactgaccacgtccaccaaggccacggtcacctccatcgtgtccgagaccctgctgtcgatgtcgctggcgacgccgctgacgctactaccggcgtcaacctgcgtgcggactgccgctgtcgttgcgctcgctgcccgagccgaatgccaccgtcgcgttcgtgaccatgccagcggagacgcccccgatcacatccaacacggccacggtcgccgcggaagcctccgagaccatgctgttgacggcacacacggcggcgctgcggccgccgttgtgcttgctgcccgagtcgcccgccaccatcgcgtccgcgtccgtgtccatgtcggcggagacgccgctgaccacgtccaccaaggccacggtcacctccatcgtgtccgagaccctgctgtcgatgtcgctggcgacgccgctgacgctactaccggcggcaacctgcgtgcggactgccgctgtcgttgcgctcgctgcccgagccgaatgccaccgtcgcgttcgtgaccatgccagcggagacgcccccgatcacatccaacacggccacggtcgccgcggaagcctccgagaccatgctgttgacggcacacacggtggcgctgcggccgccgttgtgcttgctgcccgagtcgcccgccaccatcgcgtcagcgtccgtgtccatgtcggcggagacgccactgaccacgtccaccaaggccacggtcacctccatcgtgtccgagaccctgctgtcgatgtcgctggcgacgccgctgacgctactaccggcgtcaacctgcgtgcggactgccgctgtcgttgcgctcgctgcccgagccgaatgccaccgtcgcgttcgtgaccatgccaccgtcgcgttcgtgaccgtgccagcggagacgcccccgatcacatccaacacggccacggtcgccgcggaagcctccgagaccatgctgctgacggcacacacggtggcgctgcggccgccgttgtgcttgctgcccgagtcgcccgccaccatcgcgtccccatccgtgtccatgtcggcggagacgccactgaccacgtccaccaaggccacggtcacctccatcgtgtccgagaccctgctgtcgatgtcgctggcgacgccgctgacgctactaccggcggcaacctgcgtgcggactgccgctgtcgttgcgctcgctgcccgagccgaatgccaccgtcgcgttcgtgaccatgccagcggagacgcccccgatcacatccaacacggccacggtcgccgcggaagcctccgagaccatgctgttgacggcacacacggtggcgctgcggccgccgttgtgcttgctgcccgagtcgcccgccaccatcgcgtcagcgtccgtgtccatgtcggcggagacgccactgaccacgtccaccaaggccacggtcacctccatcgtgtccgagaccctgctgtcgatgtcgctggcgacgccgctgacgctactaccggcgtcaacctgcgtgcggactgccgctgtcgttgcgctcgctgcccgagccgaatgccaccgtcgcgttcgtgaccatgccaccgtcgcgttcgtgaccgtgccagcggagacgcccccgatcacatccaacacggccacggtcgccgcggaagcctccgagaccatgctgctgacggcacacacggtggcgctgcggccgccgttgtgcttgctgcccgagtcgcccgccaccatcgcgtccccatccgtgtccatgtcggcggagacgccactgaccacgtccaccaaggccacggtcacctccatcgtgtccgagaccctgctgtcgatgtcgctggcgacgccgctgacgctactaccggcgtcaacctgcgtgcggactgccgctgtcgttgcgctcgctgcccgagccgaatgccaccgtcgcgttcgtgaccatgccagcggagacgcccccgatcacatccaacacggccacggtcgccgcggaagcctccgagaccatgctgttgacggcacacacggcggcgctgcggccgccgttgtgcttgctgcccgagtcgcccgccaccatcgcgtccgcgtccgtgtccatgtcggcggagacgccgctgaccacgtccaccaaggccacggtcacctccatcgtgtccgagaccctgctgtcgatgtcgctggcgacgccgctgacgctactaccggcggcaacctgcgtgcggactgccgctgtcgttgcgctcgctgcccgagccgaatgccaccgtcgcgttcgtgaccatgccagcggagacgcccccgatcacatccaacacggccacggtcgccgcggaagcctccgagaccatgctgttgacggcacacacggtggcgctgcggccgccgttgtgcttgctgcccgagtcgcccgccaccatcgcgtccgcgtccgtgtccatgtcggcggagacgccgctgaccacgtccaccaaggccacggtcacctccatcgtgtccgagaccctgctgtcgatgtcgctggcgacgccgctgacgctactaccggcggcaacctgcgtgcggactgccgctgtcgttgcgctcgctgcccgagccgaatgccaccgtcgcgttcgtgaccatgccagcggagacgcccccgatcacatccaacacggccacggtcgccgcggaagcctccgagaccatgctgttgacggcacacacggtggcgctgcggccgccgttgtgcttgctgcccgagtcgcccgccaccatcgcgtccgcgtccgtgtccatgtcggcggagacgccgctgaccacgtccaccaaggccacggtcacctccatcgtgtccgagaccctgctgtcgatgtcgctggcgacgccgctgacgctactaccggcggcgacctgcgtgcggactgccgctgtcgttgcgctcgctgcccgagccgaatgccaccgtcgcgttcgtgaccatgccagcggagacgcccccgatcacatccaacacggccacggtcgccgcggaagcctccgagaccatgctgttgacggcacacacggtggcgctgcggccgccgttgtgcttgctgcccgagtcgcccgccaccatcgcgtccccatccgtgtcgccgacggcggagacgccactgaccacgtccaccaaggccacggtcacctccatcgtgtccgagaccctgctgtcgatgtcgctggcgacgccgctgacgctactaccggcggcaacctgcgtgcggactgccgctgtcgttgcgctcgctgcccgagccgaatgccaccgtcgcgttcgtgaccatgccagcggagacgcccccgatcacatccaacacggccacggtcgccgcggaagcctccgagaccatgctgttgacggcacacacggtggcgctgcggccgccgttgtgcttgctgcccgagtcgcccgccaccatcgcgtccgcgtccgtgtccatgtcggcggagacgccgctgaccacgtccaccaaggccacggtcacctccatcgtgtccgagaccctgctgtcgatgtcgctggcgacgccgctgacgctactaccggcggcgacctgcgtgcggactgccgctgtcgttgcgctcgctgcccgagccgaatgccaccgtcgcgttcgtgaccatgccagcggagacgcccccgatcacatccaacacggccacggtcgccgcggaagcctccgagaccatgctgttgacggcacacacggcggcgctgcggccgccgttgtgcttgctgcccgagtcgcccgccaccatcgcgtccgcgtccgtgtccatgtcggcggagacgccgctgaccacgtccaccaaggccacggtcacctccatcgtgtccgagaccctgctgtcgatgtcgctggcgacgccgctgacgctactaccggcggcgacctgcgtgcggactgccgctgtcgttgcgctcgctgcccgagccgaatgccaccgtcgcgttcgtgaccatgccagcggagacgcccccgatcacatccaacacggccacggtcgccgcggaagcctccgagaccatgctgttgacggcacacacggtggcgctgcggccgccgttgtgcttgctgcccgagtcgcccgccaccatcgcgtccgcgtccgtgtccatgtcggcggagacgccgctgaccacgtccaccaaggccacggtcacctccatcgtgtccgagaccctgctgtcgatgtcgctggcgacgccgctgacgctactaccggcggcaacctgcgtgcggactgccgctgtcgttgcgctcgctgcccgagccgaatgccaccgtcgcgttcgtgaccatgccagcggagacgcccccgatcacatccaacacggccacggtcgccgcggaagcctccgagaccatgctgttgacggcacacacggtggcgctgcggccgccgttgtgcttgctgcccgagtcgcccgccaccatcgcgtccgcgtccgtgtccatgtcggcggagacgccgctgaccacgtccaccaaggccacggtcacctccatcgtgtccgagaccctgctgtcgatgtcgctggcgacgccgctgacgctactaccggcggcaacctgcgtgcggactgccgctgtcgttgcgctcgctgcccgagccgaatgccaccgtcgcgatcgtgaccatgccagcggagacgcccccgatcacatccaacacggccacggtcgccgcggaagcctccgagaccatgctgttgacggcacacacggtggcgctgcggccgccgttgtgcttgctgcccgagtcgcccgccaccatcgcgtccgcgtccgtgtccatgtcggcggagacgccgctgaccacgtccaccaaggccacggtcacctccatcgtgtccgagaccctgctgtcgatgtcgctggcgacgccgctgacgctactaccggcgtcaacctgcgtgcggactgccgctgtcgttgcgctcgctgcccgagccgaatgccaccgtcgcgttcgtgaccatgccagcggagacgcccccgatcacatccaacaaggccacggtcgccgcggaagcctccgagaccatgctgttgacggcacacacggcggcgctgcggccgccgttgtgcttgctgcccgagtcgcccgccaccatcgcatccgtgtcgccgacggcggagacgtttccgaccaggtccatcaagaccatgattgggggaatgccgatggtagggcgtttcggcgagggagaacgggtagagcggtcgcgatacataatgtcacataaataggctattggtatttgaagtggtttacacaacatgtaaaggctcgcctttttggtgcccattttgctttggttgatcttttcaagctttcccgcgctgacattttttcccatgtcttcgctttgaccaatcaaaacctgtctccaaaaactcgatgacagtgattggctgccaaagttcaacaagaagtgtgattggtggaattagttcaaatcgatccactgttgtttggtcggcttgctcggcttgctccgaatcaaaatgaccttctcgcatcggagctcatttccgattttgcaagctcgatcccaagtgtccctggctgaccacgctccgttcttccggtttccacgcctcggacgacggtggtacacatgtgctggccgtacccatcgtttacggcgcgtggctgcccgtgatactgtgcacgctgcggtcaagtccagcctgccagttcgccccatcactctccaagtccagcgtcgttggagtcgccacacgctcagctcctgtgtgtcgacgcatctgctgctgctgaccgcctgtgctacttgacgcgctgacctcgggacgcaccgggcatgaagatggactcgcagtccgtcgtgtacccacccgacgaccacgtcccgcacaaccgccgcaacagcgcatttgttgtcgataacgcagtgctactagaactggcgctgggatggtgtcgtttgtcccgtagtccccaactctcctcacggcattgccgccgggtgtggctgtcaaccacgttcagctgcgagacgccaagattccgctacaggaccccgagatggagcgtcggaggcggcactggacgactgcccactagacctgcaggtggacggcgttctcccgccctattttcgcttccagcgatcctcatcgacggacaaccgcgcgtagatgcctcaggagggagcggggtgccaccggcgacaaagatcaagagaggctaccgctagaaatggagcgttcgagtcccatcgggggtcaagatggagcctgaagtcgccatgacgacgacgtcgcaagcgcccaatttgcccagcgacagggacacgcagacggcattggcacttggcagcagtgtatctacgatgggcgtcaccactgtcgccgtgtaccgtagttcggaccgtcgctatgggggcttgcatgggtcaacgtaactctggagacgatgccgaagccgctacagcacttacatttggtagcaatactggagtaaatctaagtaccgtatgttaccgttgaacgctttgagtactcgtactattcatgactctgtgtaattacactgtattcatcccgcactcgatatccgatgcattttgcacggtaccttgtcagcacagctacgctgcattccgcatggcgggcattgaacctgcaccggtgggttcaaactccaccatactaacatcacatacaacgatgagtcgaaccaccccatacaaagcctagtacgttcggtccctttgaacacttcgaacatggccatacaaataacaatatattcggtccaatggctcaagcgagaccgatgcatgcaaaccagttagagatctttgccgtgaaggagccactggtacgctagctgagctcgtccaccaccacatacccaatgccacgaaagcggaagcagcggtcgagcacctgcgagcccacagctaagcgacaacaatcacgacgctcgggtcctatctcaccttcagctcccaccggtctaggtacgatccgttgcttacctagcgctcgagcaaggtatcatattgacgcgtgtccaccggcatacagtcctcgcggatgaccatgcgatgtttggatctgtttggcgagttctaagtgcggctggttggagttcaaagcgtccaacagggcgaagctggagtgatctgtaccgctatatccctcccggtggtgactcgaatggaacagagggtatcgactattttctgggtgaacgagcgcttttggagcactatcggcggacattggtagtggaggatggtgatacggatggtgcgatgacgaaactgatgccgaccaaaacaacgttaatatatgtggggctggcgatgttgctctcaacgcggcagatgatgtacgtggtagtagcggcggagttcctggagcgagtgcaaacgacgttgattgtgagaaagccgcgcttccgggagtaagctgtcacgaatcggtgtttgatggtgctgccagcacctctcaggattatgatggtgctgcctctgctgtatctacaccgccaacatcagcgcgcgtcgtacccgtacatgcagcagctacgcgagaccatttactccagctagatcaccacgcacccaccgcatcgtctggtacatgtgcgcaatgtgcagtctgcaatatggagtgttcaaccgagtgcagttgtacctggtgcaaaaaatgtctccatcacttctgctctcatgatgtctgcgtttcgttgaatatcccagaccctaatggtggattcgccaaggattttggtgatagcagctattgcagcacgctttgctacacaaacgctacaaaaatgaacttggtggaccaagggagaagtgatgaacgacccaatgccctacttgacctccccgcgagtgctttgacgccaagtgtggctccgtcggaacctgcagagaccaacgccgccacacatcctgctacaaattgctcgggggcagcaaaacctaagcgaaaaaagcgcggtcctgccgaacaatcagctccaaaggcaccccgaagcgaaaaccaagctgcgcaacggaaaacgaaaagcaagaaggcacctaccaaggccagtaaacccaaggctgtggcaatgaaagaagagttgattcgccgagcacatgcggctgccgaaaaatttgttgatgctagcgtagcattttcaccggctgatgaggagtggatgccgctcagtttgtaacgcgacgttggcgcagcatttttgattggtgtggtgactcgctacagcctggcaagcgaaaaatatgctgacaatgttagcgttcctcacgacaaatttcaggttcaatggacgtgtactgcttttcaaataaaagatcacgttcaccatgtttccgaagccatcatcacccgtggtatccgccagtttgccaacatggaaaaagacaaacttcaatttggagagtcttggacgtccctgtgcaacatggtccccaaactatcaaacattcctgcactgacagatgaatttgaggagatggacgagcgtggttatcgtgagtggtttgcgtttcgcgggcggaaagaattgcagcgccctttgtgccctggtgaagtcgaagagatagcgtcaatgacattttcacccacagcatcgcttggccaaccgtcagggctatttacacatccggatgggtcttcaactacccgactacgcccggaaagtcatgggttgtttgggcattcagcaacctcatcgttcttcgcgtttattccgttgtcgttctggatccaagtggtcgtctttaccaacgagtatgcagacgcatctggcagcccatcggcaactcctgtaagtttagaggaactgatgaaattccttgggatcctctggtacatgactctgttcgacaagggtgagatgagaaattactgggtggacgacgaggaagcaactattttttcctggagcgcgtactactagtttgaagtcaattatgacatggcgaagattcctgtacatccgtaagaatttgagttttcgttccaaggtgtctacctccgacatcaagcgcggtcctgtagctagaatacgaccactcatgagcattctgaaatcgcgatgcctgcgccatgttgaagtcggtcgaaacgtggctgttgatgaggccacaattgcctgccgatcccagtatgcccgccacattatagtcttcaacccacaaaaacccaccggaaagtatcatttcaagttatacgtgtgttgctgttctacctcgtggtacgcggtgagtttcaagttgcactgctccagtgaacttgatgatcggctggacggtgtaatttcacgctcagaagtgcagaaattcgctgatctaaccgcgaagtcgtctgaaatccgctctcacgtcatggcggttacttcatctttgaaaggatccagtcgcattgtaaacacggacaacttctacacttcctgtttgctgttgaagactttacgatcgattggtctctatgggcgtggcactgtacgcacatctagcacgcatttccctcattttacgatgattcgtaaggaggacgcgaagccgtgaggctacatgaagcaaggtgtatgcttagagaagcatattgtcgcagctagttgggtggatggctcaattgtcaatgtcgtgtctaatgccgatgcttcgaccacatcaactgtgcatcgtcgtataaatgaatcgggtgtggctttcactgctcctacttgcgtcggcgagtataattcagcgatgcaaggtgttgatcggctcgaccaactgcgtgcacgattttctctagccgatggccactcatttcagaagtggcataaaaaactagcgatggtcatgcttgatatagccaggtgcaatgcctacatttgcgatagtttggcgcgtggtgagagcgaggagtctcgttcgacgggaggtacagcccaaacgaggtcaagagcccgcgatagtcatcgcgcatttgtggcatcactggttcgagaactgttcaatggggactggaagaaatctctggatagggaacatggaatggtgtatgctgcgaagccgacaacgacaacaatgccgatgacgacccaaaccgcggcgtcgacagatgtatccgagtcttcgggcgatcacgcataaacgtgtgttgcaagagcgtcctcggaggtgcttcagggaagaagtcgctcaatgcggaaatgcactgtgtgcaagttcgagggcagagatcctaccgagaaaaccgactactgcgagacccatcgagttgcgttgtgcaagcgcacataccctgttgaccctacgaagcagcatctgtgccaacagcaaacttggacttgctggcagaaataccatttgttttacttgccgaagcaagtgtacactgtcgacggcaacttgcgacgaacctctccaatttatgtaactaaccgtccatttctgaaggcccgccaagaccaaaagaaggcaccaaggcgtaacctcacatcattttttcaagatagtcaaagtcaactaaccagttatacttcactgcactaagtcacacctattccatctgcccccgctagtcttgatgccgtaaatgcggatttagctcgtggctgacaacatactgctttaccactggtgcaccatagcggcaagctaaccacactccactgcgtataatccgacaagatgctattagaaattccacgcgcctccaagccgaacaataactcccaactgtgtatatgtcagcgaagacgcctcagaccacatccagcacggccacgttcgccaccaccacatctgaggtcatgctgctgacggcgctgccacggccgctgccctcgctgcccgagtcgcccgctaccattgcgtccgactccatgctgacgaagttgcctccgatctcctcccgtacggacacgatctctacaaaggacgtcatgctgttgatgccgctgacggtactgctggcacctctacaacggtctccttccgcactgtcgatgcatttgcgcacgcggtctggtcaccggtcacatccttgccaacctccgtgccggtggagacgcccccgatcacatccaacacggccacggtcgccgcggaagcctccgagaccatgctgttgacggcacacacggcggcgctgcggccgccgttgtgcttgctgcccgagtcgcccgccaccatcgcgtccgcgtccgtgtccatgtcggcggagacgcccctgaccgcgtcctccaaggccacggtcacctccatcgtgtccgagaccctgctgccgatgtcgctggcggcactgctgccgctacttccggcggcgacctgtgtgcggctgccgctggcgttgtgctcgacgatcgcatccgtgcccctggggacacaatagtgttgatagatatactacagaagacacaatagcgtggggttttacctatccctcttagctgtatgattggtcataaacggcgaggaaactaccgtggctcagaaaattgctgtttcagttatcttgctactacatcaccagtaaaaagatacttgatgtatcattctggtaacgatagggttaagctatctatcgtttttttgggagccccggaggttgctggggtcgacaaattgtttcagataattcatcataggaagatttctcttcgccaatggctgatcgtcgccattcttcgtcttccgaagctcctcgctcaactgagtgaatacgctctcgtcgacgaacgcagccaaagtgtcggagtccaactcgctggatatgtccacctgcaaagcagcacagcagtacacagtcagcaaagtggcagtagtatcatggcggcggtggcgagaatgggggcatgcctgctaccgtcttaccgcgtaccagacgcccaggcattgaaataaagtagaacgcctactaggcggtctatccgaatacaacgcctaggcgttctaatagtgtgataaactaaaactctgaggccctggtgtccataacgtatatatcgccgcgatactctactttcacatcgttcgtattgcgtcaaaaacgcagtaggaaaacgtcgagaaatcctgcagttgtcgagtactacaagcagcgcgcgacgcccggcggcctcatcatcgccgaggccaccaacatcacgcccacgggccgcggatcctggggctccgcaaatcgaggcttggcgcaacgtgaccaaggccgtgcacggcaagatgttcctgcagttgtcggactaccgctcggccgcggagaacgccctcaaagcgggcttcgacggcgtcgagctgcacgccgccaacggctacttgctggagcagttcctgcacgacggcatcaacgaccgcgccgaccagtacggcggcagcgtcgagaaccgcgcgcgcttcctgttcgaggcactggaggccatcctcgagagtctggactcgtccaaggtgggcatccgactgtccccgttcggcggcagcttcggcaacaaggactcggaccccgtcgccacctacacgtacgtgctgaacaggctcaacaactacgacctggcctacgcgcacctgatcgagccgcgtggctaccacgtgcgtgacccgctggcacccgagaagggctcggcgcggcagttccgcgagacgtacaagggcgtgctcctcgccgcgtcgggcttcgaccggcagtcggccgtgcagatcgtggaggagggcgcggccgacgccgtggccatcggccgccacttcatctcgaacccggacctggtgcggcgcttccaactcaacaagcccgtgaacgactacgacacggacacgttctacctcggcgacgcgcgcgggtacatggactataatacccgttcctgcaggacgagtaggtagagcagtaaagacgacgtagacagcaaaagacgtgctacttccgtaagactgcaaggtgaagcgtactggaggtggctgcgtactctcaagtaaaacaaattgttggtagttaaaactaccggtagttgctgcaggcaccaggcacgtactgttactgcctcggtgtgggcttgggcgtcttgttggatcacttggcgcgtttagtgggacggccttcttcaccctcttggttttcacgtgctcgtttcttggatgtttccgtctcgccaccttgatcgcctagtggccctcaccactgccaccaacgtcactctcatcgtcactcttcttccttgtcacccggcgcgtacgctagtgctttacgggcgttctgcaacaacttgtcgcgcgtcgcggtaagcgacaactttgcatacgaactaacgttcttgtttcgtttttcatcttcatcgcgatagtccaggtcgccctccacaagccccagcgggtcatactgagactccaccatgtttgatagaatggaagccacgtcctcgctcaggaacgggtaggtgaccctgttgagcaaacggaggcagatcgtgaaaacaggctcctcctccgagacactcgacacacttgagacgccaggattgctctcgatcttcgcccgcttcttcgcctgactcccgatcgtctgactctcctccttcacctcagaggcgttgcctttcttcttgggcttaagattgtctttcattgtcgtggcatagatgaacttgccgtcactcttccgaccgcgcacattcatgtagatgcgaatggtatcacggacatccgtggaacccagcggtttcggatccttaccaatttcatcagtagatttccccgctgacgagttcccatcactgttctttccgaacacaaaccaggggcatagtttctccgtcgctgccctggaaaacccaccatcgactggggaacgattcttcacttgaatcaacatcatcaacacttcctgctcctcttgttcacccctcgttgtctccccaccgactggcttgctggtggatctcttcttaaacatcgggatcaacaaatcggctccatactggttacgggggaaaatacctgcagcttgacgccccagcaaaaaccaaagcgtgtcctcattcggctcaagctgcaactgcacaaagtgggtgaaccccatgtaccaaccatcccacttcgagcaccacttgttgaattctggtctcaaattctccttgctgatcatccgcttgagatatatcggcagctttttcttgccttgtagcaccttcaagaattgctgcaccggtacaaattgcccgatcgtgtggcaccactgggaaaagtctttgtcccccatcatacacgtgtccatcgccagaagcagcaaaatccgagcaaccatctcgccaatttcgccaactccaccggtgtccaatgcttcatccaaaaggaggttcttgagttgcggcaggatatactttgccaaaccatgtttcagttcataccacactttcatcgctcctaaggcgagcactgggtccgaagcgtagctggtgacgtaaccctctcgtttgaaattcacatacgcgagaatcgccatgaagtcggcagtcgcccgagatgccagagccgacgttgaatgcgggcgcacgcccagacggcaaagcatggaggcgacaccaagcatggtatccttgttgtacgcattttgcgaagggggaatccccagtagcagcttgttcgccgcaagattgatcacatcttctctatccgcaggattggggcaagtgctgtaccacatcggacgccccatgcggcacaacgcgtgccaagcttgactcgcatccccggtaacgattctcttgtacatagctatcttagcacgttcttgctgtttcttcttctcttcgtctttttcagctcccaccgcaacctgagtttcgtcttccatttcttcatcttctgctcccgcatctagtatttcctctttcatttcttcatctacatcttggatgtcctctttcatttcttcatcttcgccggcttgtttttcttcacagtattgatcccagtgtgcgtccattgtctcagctaacaccactggcgcaaacgatgccaactctccatcgaaaagccgagatgatgggtccaacaacagcggaggcgccaggtccgagatcctggagttcgtatcaatcagcacgccgaaaatgcatccacgatggccgatatctttgttcacggatctgagagcatttcgcaacattcggaagtcattcttcttgtctggcttctcagtcagcaggcttctcgcttcatcgatcaccagaaccacgattctgccatttggattcttctcggtggaggtatccccctccagcgtatctgtttcatccgaaagtttcgcctttacagaggtgtccgctgccttttcggtaaacagcttcagccattccttctgaacgtccgcccaatgcttgttcgcgtagacgtaaattgtcttcaatcgactggcgatgtcttccacttcggagccttcttgaaacagccaaccacgaagctcgctcgtagccttgggaaaccccgtcgactcgtgcacacgagcacacatgtacaggactttcatgttcaaggcgctcttttgagcctcaatcgcgagttcacgcaccatccgactcttgccgaagccagaactctgcacgaccgccacacatggcgccttgtactttgtgggggtgtaggccttccagcagtcccgcagatactgtgcgaggtcgaggtgggcttcgccgaggtaccggcccttggtgaacgcctccgcgattcgcttcatttcattttcatccaacttgggcgtgccggagcgggcttcagggacaaactttgccaggaggtctttcaccgtcttggccgcaatagtttgtgcaagaggtggagacacgcgtgtatgcccgtatgcttctctgatctccacccatatcaatccatgtatccggttctgggaggcctcgagttggagtgtggctttgttgggatagtcgaccagcatccacgcaacgaaaagatttttcttcggcgatgcgtctgctccaagcttcccgctcatctgagcaaagacactgtcgtccacgaacgcggccaaagcctggggatccaactggctggacatgtccatctgcagcagcacagcagtacacagtcagcaatgcggcagtagtatcatgacgacgttggcaagggcgcgggcatgcctgctagtcccggtgggcggtggcgctacaggacaaggcttggaggggaaatgtggaaatggccggttggatttttcttccctcagttttgtaccagaaacacggtaccgcatctacgtgatatacagtgcgcgccgaaattataaccgcaccccaaaaattatttttttaaaccaatgattgtgctttcggcgccaaaccgctgcttatgattcgtctaaaatcgatagaaaacagatgcaacaatcagaatcgaaaaagctgtaaccgtttttttgcaatggacgaaaaaccgactttgggtcgggtcaaaattatagccgcacccggtaagctatcggtaagattggtaacaaactcgtggagagctgtttcaagcgtaataaatgaactaactccattgaacagctcgaataacgcctaccggtacagtaaaatgcgtcgataaggaacgcctgatatacattgaaagaaaaggtatattgataattaaaggtttgactcgtcacatgcagacagcaaatgcactgatttactgcaatatgtagttcatgtcggacttcgcgaccagagtctcggcttgaacccacgcagccaactcagcataggtagcacccggtagatcacgacggcgatgacagattagcagcgactgaagcttggtcagacgtagccacctctggaacggtctggaagtggcggtcaccatgggagttgtgagcagcagagcgaaagttggttaatgaggcatgcagacatgtacctggcgcgatttccgcgctcacagcgatcctcatgctcatgattccctctcgcgacctttaggttccatttcccccgacttgggagccgctccatccagccgctcttgaggctcggtttcggaactgtgattggcggaatgttaaacgggaccgaatgattggtagaatcatataactaattcagtacaattggcacacaatgggtacaagcgaggattcatgtcttgtcgtagaatataaaatgtcgcccgttccttatcgacgcacttcactgtagtaagctgctcaaataaggttaagctgacgcggttgataagattcaatggagacacgcactatcttgaatttgtatagaagagtggtgtttgacagtgtggagaggtctatactcgtaagttgaggctgtcagctgactagtgtcttcattggcgtctattcaacatggtagcgatgctgggcttgctcagttcagcaacatgtaccagaaaactcgatcgatttttttccgggtcaatacaaatcctttatacttgatgtttccagtcacaaatttcaatcaagtctagtcagtcccgtacagtgtaaatacatggctacgtatcaaaagtagagtatttcttcctgaaaataatgcccgagttgcttccagaatcctcctactgttgtctcggaagtccggccaagttgccaccaagtgtttagtgcgctttatggtattaataaatgtgcgaacaataacttcggcgatgcggtacataccataggtaagatacgaccacacgggccgcatcggccccagccgggcggcgtgcccgtgtcgtccagctccaagctcgagaacatccgcgccggcaagaagatcgtcacgcgcgaaggacgcatggagcccgtgccgccgcgcgcgctcgagacgagcgagatcccgggcatcgtggcggactaccgcacggccgcggagaacgccctcaaagcgggcttcgacggcgtcgagctgcacgccgccaacggctacttgctggagcagttcctgcacgacggcatcaacgaccgcgccgaccagtacggcggcagcgtcgagaaccgcgcgcgcttcctgttcgaggcactggaggccatcctcgagagtctggactcgtccaaggtgggcatccgactgtccccgttcggcggcagcttcggcaacaaggactcggaccccgtcgccacctacacgtacgtgctgaacaggctcaacaactacgacctggcctacgcgcacctgatcgagccgcgtggctaccacgtgcgtgacccgctggcacccgagaagggctcggcgcggcagttccgcgagacgtacaagggcgtgctcctcgccgcgtcgggcttcgaccggcagtcggccgtgcagatcgtggaggagggcgcggccgacgccgtggccatcggccgccacttcatctcgaacccggacctggtgcggcgctttcaactcaacaagcccgtgaacgactacgacacggacacgttctacctcggcgacgcgcgcgggtacatggactataatacccgttcctgcaggacgagtaggtagagcagtaaagacgacgtagacagcaaaagacgtgctacttccgtaagactgcaaggtgaagcgtactggaggtggctgcgtactctcaagtaaaacaaattgttggtagttaaaactagttgctgcaggcaccaggcacgtactgttactgcctcggtgtgggcttgggcgtcttgttggatcacttggcgcgtttagtgggacggccttcttcaccctcttggttttcacgtgctcgtttcttggatgtttccgtctcgccaccttgatcgcctagtggccctcaccactgccaccaacgtcactctcatcgtcactcttcttccttgtcacccggcgcgtacgctagtgctttacgggcgttctgcaacaacttgtcgcgcgttgcggtaagcgacaactttgcatacgaactaacgtccttgtttcgtttttcatcttcatcgcgatagtccaggtcgccctccacaagccccagcgggtcatactgagactccaccatgtttgatagcatggaagccacgtcctcgctcaggaacgggtaggtgaccctgttgagcaaacggaggcagatcgtgaaaacaggctcctcctccgagacactcgacacacttgagacgccaggattgctctcgatcttcgcccgcttcttcgcctgactcccgatcgtctgactctcctccttcacctcagaggcgttgcctttcttcttgggcttaagattgtctttcattgtcgtggcatagatgaacttgccgtcactcttccgaccgcgcacattcatgtagatgcgaatggtatcacggacatccgtggagctcagcggtttcggatccccaccaatttcatcagtagatttccccgctgacgagttcccatcactgttctttccgaacacaaaccaggggcatagtttctccgtcgctgccctggaaaacccaccatcgactggggaacgattcttcacttgaatcaacatcatcaacacttcctgctcctcttgttcacccctcgttgtctccccaccgactggcctgctgttggatctcttcttaaacatcgggatcaacaaatcggctccatactggttacgggggaaaatacctgcagcttgacgccccagcaaaaaccaaagcgtgtcctcattcggctcgagctgcaactgcacaaagtgggtgaaccccacgtaccaaccatcccacttcgagcaccactcgttgaattctggtctcttatcttccgcgttgtacatccccttacaatatatcgacatctcctcgtggcctgttagcacgttcaagaaatcctgcaccggtacaaattgcccgatcgtatggtagcactgggaaaaatctttgtcccccataacacacttgtccatcgctagaagcagcagaatgcgagcaaccatctcgccaatttcgccaactccaccagtgtccaacgcttcatccaaaaggaggttcttgagttgcggcaggatatactttgccagaccatgtttcagttcataccacactttcatcgctcctaaggcgagcactgggtccgaagcgtagctggtgacgtaaccctctcgtttgaagttcacatacgcgagaatcgccatgaagtcagcgggggcccgagatgccaaagccgacgtcgaatgcggtcgaacacccagtcgacaaagcatggaggcgacaccaaacatggtatccttgttgtacgcattttgcgaagggggaatccccagtagcagtttattcgccgcgagatcaatcacgcgaacttatgagctggatcggggtaagtgctgtaccacatcgggcggcccatgcgcctcaacgcctcccaggcctgaccgtcacttccagttacgacggtcttgtacatggctatcttagcacgttcttgctgtttggttttctcttcgtcttcagctcccaccgcaacttgggttccctcgtttatctcttcatcttcaaagtagtcatcccagtgtgcgtccatcgtatcagctagtacaagcggcgcgaacgatgccaaactacctccagatttccgagaagatgggtccaacaacagaggctgcgtcaggtccgagatctgcgagttcgtatcaatcagcacgccgaaaatgcctccttcggggccgatatcttcgttagcggatttaagagcatttcgcaacatacgaaaatcgttcttcttgccatccacctcagccagcagacttctcgcttcatcgatcaccagaaccaccattttgccatctggatccttcacggtggaggtacccgtagtttggataaaggtgtccggtacggatgctgaatcggacgcctttatcatttctgtttctttcaaaagcttggccgcacacggaactgtcagttgcattgtcgataaacagctccagccattccgtctgaacgtccgcccaatgatctttcgcatagcagtaaatcgccttcaatcgcctggcgacctcttgcactgaggaggcggcagggtcaaacagccaatcacgaagcttactcgtagcctccggaaaccccgtcgatcggtgcacacgcgcgcacatgcacaaaactttcaggttcaagttcggttctcgttctgccttgagcgcaagctcacgcactgtccgactcttgccgaagccggaactctgcacaaccgccacacatggcgccttgtactttgcagggttgtactctttccagcagtcccgcaggtattctgcgaggtcgtcttggaccttgccgacgtacgtgactttagtgaacgcatccgagagtcgaatcatttcgtcttcacccagcttggtgatgagggggttgtcttcgggaacaaactttgccaggaggtcttcaatcgtcttgaccgtaatggtttccgcaagatcgaccgtcacgtctgggtgctcgtatacgatcccaatcttcacctccaagtatcccttaaattctttctgagagacccggagtcccgcgtcgcgatattttttcaaatactcatcgatgcgaagaggtttcttctccagtgctccctcgttgccttccttcgcgtcccccagtttcgcgctcaactgagtgaagacgctgtcgtccacgaatgcggctatctcctcgactccaggctgcagagcggcagtgttgcggtttggcgagagagtgcgacttctctttaatgtagaccacatattcgctttaattggacataatcactatgtagtttctgtttttattggacaaaagtatttaggcgcacatctcgccaggtttattataataacacatattgtactttttggcacttcagactgtatttgtgctttgcaatgattttggcaatatgaggcgagatttgctgtattattacgaccacctgctagatttacgataaatcgaggtgcataaatgggtggaggcctagaattacgctaaaagcgccataattgcactttcaaaagtgcaattgtggctgtgcagctgcaattctgtcggtttttatccacaagcacctacacacacggcaattatgcataagagggtggatgtgctggggatcatggacggtggtgtactgggccaatgcatggctgctgacaggccctcccaagtcgatatatatatgaggaggtggatttatgcataattttagcaggccgtgtatcttctttcacacatatttaggagcaggctttgccatatttagcgtctaaaatggtcggcaaaataagtgcaaagcacaataactcgtacgacttatcgagcacgactataaatcgtactcgagtacgaattgctgtaagtcgtggatggccaatcacttgtgtcgagcatttgtaagacagtttgacgacaaatcaaatgtagcaatttcattggataatattgtattatgtagttttgagtgttgctgcatctcggctcgtaaattggactgattcatatgtgtgcgcattttgccccctttactagaggcagcgcacttgaaaaatgtccgggcttttgatcctgacgccatgcactaacctcctgctagaagatttaaatatacttgccaggaatggaatgtaaggacatcatagcacagttatcatacgaccgtttgttcccgtagtggagcaatgtttcttcgctttactggggtgaacgacaacagtcgttcaccccaccacgccaactctcctttctacagtaaagtactaacactacatagaagatggagattcggatagagggcgcatacgcaaaccagtctacgctgtagcatcgacaaaaagcatggctgcaggcagtggcttagttgcaggagataccgagtaactcgccgatgccgaaggtcgagcccagcagcgatatggcgcgcgccgagcgcccgcgcagcagtgtggagctcctccgcacctcagcgtcgtaggtacaatatctaggtgttatcgccgttgcagagtacgtggttgcattttgttgctggactgtaatgattaggtaagagggggtcggaggatctcgggaagcccactggcaacaccgttccctggctgcctcgccttcacaactactatgatgtacgctcaagcataaaaattactacattaaaatgtacatgtagtaccgttacgagctatttgtccctcttagtctacgtctacaaacttcatcgcaactccgtgccctacaacggctgcacctctgagtggaacagctccacggactgcatgcacgcgttcgtgcagtcattatgccgatatttaagcttgctgccagcggccaactacaggcacatcgcttcgtgtgtgaacaggaggctactttccctaccgcaccatgcaactgcatcgtttcggcgctcaacgttgccaccgcgtccgcggcaacgatgccgctgtcgtggcgagcagacctgaacatttttggccaattgtatggcgcaaactagtgtccgacaaactgtcttatgttttgacagacaatatgcaatgtagccactggtatacaacaaccaagatgtagtcaaaacgcgttgatcggaaaacgtaagacgctttgtcttatgataggcattctggggctaagtatcgtcttacgaaagagtatgaatcagcactaggagcatctccaccggtcgtgagtaaaactaaattttaccccttttctgtcaatatttaatcatagttttagttttgtacagctccaccggtttgagcaaatgctgagcaaattgctccattttttacgcagatcaacgttttgcacaactttgccaacggaggaggctttgagtaaaaggttgagtacatgtaaatgtcgaccgaccagtagtagggccaagtcaagcgttctaagcagcgcaagcgtcacagaccgcagtgtcgcccttgctacgtcatccctgggtcttcctcaacgtgctgccgggccctttatagggctatacagctgtgcgccgtcgccatggctggtgccgaaccaagagctttaacgcgcttgctgcgagtctcaattgccggtggagctgtgcactgtctttagcacggttgtgccgttgtaggcacggatcttagggcaatttgcttttagtattactcagcaccggtggagatgccctaataagtagtgcgcatatggaggaattaagtaattcaagtagattgaagcatttttgtaaaagtctaagtaggtgaatgcatcaacttgcaagtagattgccacggtcaaaaataacgttttatcagaacttgaaaacgcgataagaattaaggacagggtaagatatgaagatgatggaggacgagcaaacggaacatcagcgataacaaaataagtaggtgcctcattatcgaaaacatcatggtgccaactgccccctgtgcaacaccaactgggctgtctcaagtctgcggcagctcgttggcaagcgtgcgtgcctggaaaagcggtacccgatcctaaaggctcagcgactggaaatggcccgagcctacaagcgcgagtacgataagctgtaccaccgcgctcgccgtgacgcgcttaacgagcttgacctgcgtatcatcactactgccgcaggtgacgtgaccacgactgttgttgagtcgctcgtcctgtctgtgcctggggacattgagttagggggttcaacaacagctcagagctcacctccccgctctgctcgacgacgtcgtgttttctcggcaccagctcccccaacggtgatcgacattacgggggaggaggaccaagacgaggacctatcaacttgcgccatttgctagtacgcgccagtggcgccggtcaccccgcgctcatgctgacatgccatgtgtgccgagtgcatgtcaatgtacgtggcgagaagcattcaggccgaaaatgtagctaactgccctacgtgtagagttcccattcggatgtagccatccggctagccatacagctttattttcttcatttttgagtaattaaaaatattttttcactttattttgatgaaatggtctaagcagcaaatgataataaatttgttgtatatacttctttcatttacattgcgtcagtatcaataatagcgcacaagaacgagttgtattactgggaagtaaagtcgtacgatcgtgcgaattgttgctatggaataccaattttcgtcaagtcacagtaagcatcaaagtaacacattcgtacgatattacagatataatatctttcacttaagtttatccttgcagtatattatctatccttgaactatcacgtgtataatactttccttcgatccaagttctattaaatgtaaataagaattttatgatatcattttcgtacgagaagaattttaagaaaaccaaggtccgttctcaacgtattgacactaagaattcgaaatgtaatttttgctttgttatgcttttgcaaagacttacgactctactgcatacgtcttgcagctctagtattattgagtcatagcaatggcaggcgacgccgcagaacctggtcgtgcagacctgcgtttgttcttcggctttggacccggcttcatgccacgcttccctatgtcagcttcagtgacgatgacttcaggtactagcagttgaagatcctgagcgatggtcgccgagcgaacggtcgggacaaactggtagtaatatgtccaccgcgcgaccgacacggtgtgttccttccaggcgaaaagctcgctcacgtgcattccgtgatgaattgcagctttgactgcatggacacacgggaacatcaggtcttgccagcgtcggcacgttgcattccttctcgatcaagttcacggttcgccacagatgggcgtggtccggtctgctgctgatgtccgtgaatcgcaccatgtactggccatcaaggcacggcaaaatctgcagggttttcgtaagagccatgatcccgtcgagcttcttcttgtaggtgggaaggagaaagtccgagaaggctgcaggggtggtcctcatcacgtcaatttcgcaatcgtcgtacggctcaccttgggaggtgcttgcgtgtcctgcgttgctacctggacccttctgtcgcgaggaggtgcggcgcctttcggcgaacagctcaaccaccttgacgaagtattgctcgaaagcttccaaggggtaggacgaccgcactgcattgcccaaccaactgttcgctgcctcggacaggttggaagtgacctcgtcataagagggttggttgtacttctcgttgaacgcgtatgtcacccagtgcgacttgtcaattccagcgagatactccgcagccaaagggcgagtctccgagcgttttgagctgtaaaacttgtagtcgttctcgcattcgctacgtgccatctgaaacacaagtgactgttctgccggcgtcagcgcggagcccttcttctcgatgttggtgataatgtgcccaacgcaaaatcgatgtccggaatccggatacaactccgtcacagacgccaggagacccttctgtctgtccgatacgaacacaggtttccacgccgagacgtcttgaagcgcgtctttcatgttctgcaggaaccagctccaatgagtaatcctcttgatcgacaatagcgagtccgaaaactaggatgtggctgtggtgtagcggaatcggccaaaatctggtgaagatcgaatgtattggcgtgacgcggggataggttgtggagcagcgcgggaatcttcgctctgcgtccgagtatacgctccgatcgagggttgttcgctccgatcggtcggcctggagtcgatccacggcctgtagttgcctttccgggtgtgttccttcctttcgtgagttgcttgccgcttcctatagcgggatcgaggttgatcgagaggagaaacgatcgccggccaagcagtatccggtcgatcgagggttcgcacacaagaaatagatcgctagagtaggtcaagctggccaatgtattaatccagtcttaaccgtaccactagctcactgtccaaagtgtcgttgcttgccgaggccaatgtagttcctgggacttgacgacttgagggacttgtgctcttcggtgcaaattctgctctgatttatgtttagctggtgtctctctaccactaccatctcacctaccatcctacaactaaacaactactggattcttgtcctggcttcacccccatgtgctccccatcttggctgatcggcgatcgacgatcgacgatccacagctctcgatcgcgatcagtccacttcggtcttcagccgtcccactctacgatgtcgctcgttgatcttgccctcgtgcatgacgtccttcgctttcgacatgcgcccttcgcaccgcgcctcttcgatcggtgtgggacgaggcatcaccactctccatgtgtcgatcagctttgatctacctggttccacaccccgcctacgtgcgagtatcatcccggtacctcgatcgctcgtcgaatctcctcgatctccgcaatcccagtcttgttcaggtcgcccttctctcgatcattgatccccttgatttttggtcgatcgtttatgccgcctttctcagagaacaaatcttgttctcgcgcttctccacatggccttctaggtccttcgtggtcgccaacagaaacactccgcgcttgttcatatcacccttgagatgtgttccgtccagaccgatgacgtgtcggcagtgtacttgaaggcatgcccctggaaaaacgcaagcccttctgaacatgtcattctcgcgcctgccaaacccgtagcatgtcttggagttcgcatcactcaccatggctagatatccctccagcttctggtaactcccgacgacgtcgtcgcgcagcgattcgagaagatcccgcttgatcttggatgccgcagttcggttcgttatcacccccttagtcatcaaaaagtcgatgatagcccgccctgtgcccgaggcccacgttccgctgtaagaggggagcaactcacgctcaacgacgcccctcatcactcggtagggcacatcgcgaagtcgctgacgagaggtatctcctgcgagaccgccttcaacaaaggtatcgccctgaaaaccgccgtgtctgaagtggtcatgggccagacacatccttgttatcttccagttgttgcggatcccgtacaccgtaatgaaaaatgggcagttggcagtgctgcctggaatgagctgctgctgccctttcaccgccttgcaagtgtacttggcgttccttcttgacgacgagagtgatagctgttgttggccacgcgaatggaaaagccacgggctcgagcaaactcgcgacagcgttgcagcagagcctttttcgactcaagcgtcgcagacgcaacgttgttcccatggtcggaaactacgccgtaagaagaggggtcgaggggatccaagccgacatctagctcaggtcgtagcatgcgcatctcgatgagttcggcgatgtccgcttcttcgacagcggatgaggtgatcatgggcgaagacattgtccgggtgaccgaaacacgagaggtggtagaggtgttgaggcgtgtagttgggtgggtatccgacaaaaagacgaatgagccctgcagtgaaaactcgcgagctaagagaacacgggctaaacgaggtggttatgaaactcctacagagatgtgttgctaagctccggcccaagatactgaaaaaaagtatgaacgtccgtttcaaaatgtacgacaagaagctcagaataccgcgaagtgagatgctcggaatgcccgtccgttttaaaacttacgagtcgtaagttattgctgtcgtacgttacaataaacgtaagagtacttaacagaggcgtggcctgctcagaatgcccgtccgttttaaaacttacgagtcgtaggttgttgctttcagacttttcaacaaacccaactgtacttatcagacgcgcggccgacgaagttttaatacagaaccaagtgcgttagtttggtctgcgtgcatacaattctacgaagcgatgatgtaaacttacacattagcattacgacactcttactctaaaaagttaatttcgtacgatattacttggccctggaaaacagttatttttgcccataaaattaacgttcaattcggatatgataaaacgttatttttgactgtggcaatctacttgcaaattgatgcattcacctacttagacttttacaaaaaggcttcaatctacttgaaacttaattcctcgcgcgtatgtcatctcctgcatgatttagcacatccagcatggattagcatccttttggcactttccgaaagtgccatttccgagccaagctggcttcgaaacacgacttcaaagccactatgatttaccactaagtacgaacactatctagtgcactaattaggagggaaaaccggttgcaaagcacaatatcatagagcacatatatatcatagagcacactttcgattatccaatgaaagccatataattcacacttgaaataagacattcaacctcggagcctgatagccgcgctcgttgcgttacgccattttgaatggcgcgaacaggtagaacgcgcttaaaaagtgaaggtgacgcgcggccaaagcagtacgagcgctcgttgcgattacttaagtacgtacgagttcaagctgtgtgtgcttcgattcctagacactacaccgatggcaaaaatggtagctaacggaaaacgccaatttgtataccgcatactattgaattgaacacttgtcaaatctagaaagatatacaaataggaagggggttatactaccaaagtagctccgacgcattcaagtctgaaatattgtgtgtagagctagctacgttctgcaaaacctctttgatggcatcctgccaacgtatgtaccagtcttcaaaccatggagacatccatagattgcgcagcgttggttcacaacgtctctcatgccgtcagatgcaagcagaacttagaccaacaaccaaaaccatttttctttgggtaccttacggtaattttgcgtaaagttacacaaaatgcaaacagtaccgaatacaagtgtcagtttttaaactgtggtctttaaaaagataaaaataaccggatcttgcttgccgtatttgacaaagtaatacttacacggaaaataaagggtgattttcaattttaagacatctcttagccaatcaaaagatgtttacatgctaaacttcacataaatttcaagaaaattataagtactcaacgttctatacggtttggttgaggtatacaaattggcgtaggtacaatagctttgtatactgagcacattctatcagatttgagaggaggtattcaattcgggaagggtacgctatttggcgctatccgttaagtattttcctgacgggaaggtgattcccttcatttcattttcatccgggcttcaggaacaaactttgccaggaggtctttcaccgtcttggccgcgatagtttccgccagatcgaaggtcactccaggaatctcgtacacgtccatgatcttcgtgaatattaaccctatcgttaacgccattcatttctgtttgaagggacaccatacaaactttaaggaaaacggggtaaaatgatgcatgaggtgtattaggtttgcgaggccaactgatcaaaagtatacgtgatgggaggtttaaagcgacctttcgatcaaaaagatacgtgaggcatcattttactgcttctctgtgattcgctgcgaatcgacaaaagtatcagtggaagcagtaccgtgagaacagcaccctaacaaaactttagtaagagcggtaccgtggatcacagcgccatcttgtggattatgtggggcttttcctagttgtgaagcggcggcgccgtggtctccgatgcgacgctggccactatggcggctgtcctggacctggccggagcgtctccgacggcggcgacaagcacgcgatgactgcgggcatctcgggcagcgggcgaaatggctacgggagcgccgtcagcaccgtcaacagcatggtctcggaggcttccgcggcgaccgtggccgtgttggacgtgatcgggggcgtctccgctggcatggtcacgaacgcgacggtggcattcggctcgggcagcgagcgcaacgacagcggcagtccgcacgcaggttgccgccggtagtagcgtcagcggcgtcgccagcgacatcgacagcaggttttcaggcgtgatggaggtgactctgaccttgggggatgcggtcagagctacgatgtccgtgcaagacgttgatgtagatgtgtacaatggctgatatatgttattggctctacaggtaatgaacaatgggatgaacatgtctgacaaacgaagtatattgaatgtccctttccattctgcgcgaggtacttagatgtagggctctacaaccctggtgtaccagtatgcgtgatgaagctgggaagaccaagacacttgaacgtcgatacgctgtcggagcgtccagacagagcagaagttgcgcgggcaggttgggcggtgccggccgcaaattgttgccatgacaacgacgtggaccaaacctgctgctgaagatgcaaagtcctccagcgccgcaaaacttgtaggctcgaaaacgatattgttcgcaaataaaacactgcacccgtcaatatcctcgcgtacggctgggctcatcgctctgaggtcggcctcgtgaatcgtgaccttggataaattcgggaaatccacgcgtgcgccacgaatcagcagtttggacatgtttgccaagttgtcctggaactcaatcccgatgcatctcccaacacaagtctccagtgccacttgtgcaaccacgttgccgatcccagatccaaagtcaacaaaagtgtcggcgattgtaagcgttggaatgactgccagtattgctgaaaccccagttggcgaaatctcaccagcatgacaatccggcgcatggacgggttgacgcaaggccgaggcatacaaacttgacacagcgtcatgaacgttgccaacattatcgggagcgctcaacttgtggccaccactaagcgcgtccgtgccgatttttgatcccgaaatctccttgggaaagaatctaagctcacgccgtgtgtcctcttcagcgtctttagacgaatctgcagctgtcgctgtgtcttcccgcagtatggcatccccaaccagacagcccgccagttaattcggcggcctgcatcaacctgctcctttgccagccgataacgcagcaagtcctcttcgtccgagaagtctgccatcgggttgccacgatatctagaaatccataatgccatacataccataagatatttggtctcatacttcttcgcctgataacctaccgacctttcacaaaggtcccatccccatcaatgtactcaacaccaggttcaagacgctcctaccgccagcaaggcaactaagcccggctatcgatgccgctgctataaacgctctcgtggcgctgcccagccaacacgaaagcacccctattagcctcatcgaccgcgccgaatgccaccgtcgcgttcgtgaccatgccagcggagacgcccccgatcacatccaacacggccacggtcgccgcggaagcctccgagaccatgctgtcgacggcacacacggcggcgctgcggccgccgttgtgcttgctgcacgagtcgcccgccaccatcgcgtccgcgtccgtgtccatgtcggcggagacgcggctgaccacgtccaccaaggccacggtcacctcaatcgtgtccgagaccctgctgtcgatgtcgctggcgacgccgctgacactactaccggcggcaacctgcgtgcggactgccgctgtcgttgcgctcagcgcccgggccgaatgccaccgtcgctgcccgagccgaatgccaccgtcgtgttcgtgaccatgccagcggagacgcccccgatcacatccaacacggccacggtcgccgcggaagcctccgagaccatgctgttgacggcacacacggcggcgctgcggccaccgttgtgcttgctgcacgagtcgcccgccaccatcgcgtccgcgtccgtgtccatgtcggcggagacgccgctgaccacgtccaccaaggccacggtcacctcaatcgtgtccgagaccctgctgtcgatgtcgctggcgacgccgctgacactactaccggcggcaacctgcgtgcggactgccgctgtcgtggcgctccgtgcccgagccgaatgccaccgtcgcgttcgtgaccatgccagcggagacgcccccgatcacgtccaacacggccacggtcgccgcggaagcctccgagaccatgctgttgacggcacacacggcggcgctgcggccgccgttgtgcttgctgcccgagtcgcccgccaccatcgcatccgtgtcgccgacggcggagacgtttccgaccaggtccatcaagaccatgattgggggaatgccgatggtagggcgtttcggcgagggagaacgggtagagcggtcgcgatacataatttcacataaataggctattggtatttgaagtggtttacacaacatgtaaaggctcgcctttttggtgcccattttgctttggttcatcttttcgagctttcccgcgctgacattttttcccatgtcttcgctttgaccaatcaaaacctgtctccgaaaattcgatgacagtgattggctgccaaagttcaacaagaagtgtgattggcggaattagttcaaatcgatccactgttgtttggtcggcttgctcggcttgctccgaatcaaaatgaccttctcgcatcggagttcttttccgattttgcaagctcgatcccaagtgtccctggctgaccactctccgttcttccggtttccacgcctcggacgacggtggtacacatgtgctggccgtacccatcgtttacggcgcgtggctgcccgtgatactgtgcacgctgcggtcaagtccagcctgccagttcgcccctcactctccaagtccagcgtcgttggagtcgccacacgctcagctcctgtgtgtcgacgcatctgctgctgctgaccgcctgtgctacttgacgcgctgacctcgggacgcaccgggcatgaagttggactcgctgtccgtcgtgtacccacccgacgaccacgtcccgcacaaccgccgcaacagcgcatttgttgtcgataacgcagtgctactagaactggcgctgggatggtgtcgtttgtcccgtagtccccaactctcctcacggcattgccgccgggtgtggctgtcaaccacgttcagctgcgagacgccaagattccgctacaggaccccgagatggagcgtcggaggcggcactgacgactgcccactagacctgcaggtggacggcgttctcccgcccttttcgcttccagcgatcctcatcgacggacaaccgcacgtagatgcctcaggagggagcggggtgccaccggcgacaaagatcaagagaggctaccgctagaaatggagcgttcgagtcccatcgggggtcaagatggagcctgaagtcgccatgacgacgacgtcgcaagcgcccaatttgcccagcgacagggacacgcagacggcattggcacagcgactccttccctgaagcacctccgaggacgctcttgcaacacacgtttgtgcgtgatcgcccgaagcctcggatacatctgtcgacgccgcggtttgggtcgtcatcggcattgttgtcgttgtcggcttcgcagcatacatcattccatgatccctatccagagatttcttccagtccccattgaacagttctcgaaccagtgatgccacaaatgcgcgatgactatcgcgggctcttgacctcgtttgggctgtacctcccgttgaacgagactcctcgctctcaccacgcgccaaactatcgcaaatgtaggcattgcacctggctatatcaagcatgaccatcgctagttttttatgccacttctgaaatgagtggccatcggctagagaaaatcgtgcacgcagttggtcgagccgatcaacaccttgcatcgctgaattatactcgccgacgcaagtaggagcagtgaaagccacacccgattcatttatacgacgatgcacagttgatgtggtcgaagcatcggcattagacacgacattgacaattgagccatccacccaactagctgcgacaatatgcttctctaagcatacaccttgcttcatgtagcctcgcggcttcgcgtcctccttacgaatcatcgtaaaatgagggaaatgcttgctagatgtgcgtacagtgccacgcccatagagaccaatcgatcgtaaagtcttcaacagcaaacaggaagtgtagaagttgtccgtgtttacaatgcgactggatcctttcaaagatgaagtaaccgccatgacgtgagagcggatttcagacgacttcgcggttagatcagcgaatttctgcacttctgagcgtgaaattacaccgtccagccgatcatcaagttcactggagcagtgcaacttgaaactcaccgcgtaccacgaggtagaacagcaacacacgtataacttgaaatgatgctttccggtgggtttttgtgggttgaagactataatgtggcgggcgtactgggatcggcaggcaattgtggcctcatcaacagccacgtttcgaccgacttcaacatggcgcaggcatcgcgatttcagaatgctcatgagtggtcgtattctagctacaggaccgcgcttgatgtcggaggtagacaccttggaacgaaaactcaaattcttacggatgtacaggaatcttcgccatgtcataattgacttcaaactagtagtacgcgctccaggaaaaaatagttgcttcctcgtcgtccacccagtaatttctcatctcacccttgtcgaacagagtcatgtaccagaggatcccaaggaatttcatcagttcctctaaacttacaggagttgccgatgggctgccagatgcgtctgcatactcgttggtaaagacgaccacttggatccagaacgacaacggaataaacgcgaagaacgatgagattgcggaatgcccaaacaacccatgacttttcgggcgtagtctggtagttgaagacccatccggatgtgtaaatagccctgacggttggccaagcgatgctgtgggtgaaaatgtcattgacgctatctcttcgacttcaccagggcacaaagggcgctgcaattctttccgcccgcgaaacgcaaaccactcacgataaccacgctcgtccatctcctcaaattcatctgtcagtgcaggaatgtttgatagtttggggaccatgttgcacagggacgtccaagactctccaaattgaagtttgtctttttccatgttggcaaactggcggataccacgggtgatgatggcttcggaaacgtggtgaacgtgatcttttatttgaaaagcagtacacgtccattgaacctgaaatttgtcgtgaggaacgctaacattgtcagcatttttttcgcttgccaggctgtagcgagtcaccacactaatcaaaaatgctgcgccaacgtcgcgttacaaactgagcggcatccactcctcatcagccggtgaaaatgctacgctagcatcaacaaatttttcggcagccgcatgtgctcggcgaatcaactcttctttcattgccacagccttgggtttactggcnnnnnnnnnnnnnnnnnnnnnnnnnnnnnnnnnnnnnnnnnnnnnnnnnnnnnnnnnnnnnnnnnnnnnnnnnnnnnnnnnnnnnnnnnnnnnnnnnnnngttggcgaccacgaaggacctagaaggccatgtggagaagcgcgagaacaagatttgttctctgagaaaggcggcataaacgatcgaccaaaaatcaaggggatcaatgatcgagagaagggcgacctgaacaagactgggattgcggagatcgaggagattcgacgagcgatcgaggcaccgggacgatactcgcacgtaggcggggtgtggaaccaggtagatcaaagctgatcgacacatggagagtggtgatgcctcgtcccacaccgatcgaagaggcgcggtgcgaagggcgcatgtcgaaagcgaaggacgtcatgcacgagggcaagatcaacgagcgacatcgtagagtgggacggctgaagaccgaagtggactgatcgcgatcgagagctgtggatcgtcgatcgtcgatcgccgatcagccaagatggggagcacatgggggcgaagccaggacaagaatccagtagttgtttagctgtaggatggtaggtgagatggtagtggtagagagacaccagctaaacataaatcagagcagaatttgcaccgaagagcacaagtcccctcaagtcgtcaagtcccaggaactacattggcctcggcaagcatcgacactttggacagtgagctagtggtacggttaagactggattaatacattggccagcttgacctactctagcgatctatttcttgtgtgcgaaccctcgatcgaccggatactgcttggccggcgatcgtttctcctctcgatcaacctcgatcccgctataggaagcggcaagcaactcacgaaaggaaggaacacacccggaaaggcaactacaggccgtggatcgactccaggccgaccgatcggagcgaacaaccctcgatcgaagcgtatactcggacgcagagcgaagattcccgcgctgctccacaacctatccccgcgtcacgccaatacattcgatcttcaccagattttggccgatcccgctacaccacagccacatcctagttttcggactcgctattgtcgatcaagaggattacgcattggagctggttcctgcagaacatgaaagacgcgcttcaagacgtctcggcgtggaaacctgtgttcgtatcggacagacagaaggatctcctggcgtctgtgacggagttgtatccggattccggacatcgattttgcgttgggcacattatcaccaacatcgagaagaagggctccgcgctgacgccggcagaacagtcacttgtgtttcagatggcacgtagcgaatgcgagaacgactacaagtgttacagctcaaaactctcggagactcgccctttggctgtggagtatctcgctggaattgacaagtcgcactgggtgacatacgcgttcaacgagaagtacaaccaaccctcttatgacgaggtcacttccaacctgtccgaggcagcgaacagttggttgggcaatgcagtgcggtcgtcctaccccttggaagctttcgagcaatacttcgtcaaggtggttgagctgttcgccgaaaggcgccgcacctcctcgcgacagaagggtccaggtagcaacgcaggacacgcaagcacctcccaaggtgagccgtacgacgattgcgaaattgacgtgatgaggaccacccctgcagccttctcggactttctccttcccacctacaagaagaagctcgacgggatcatggctcttacgaaaaccctgcagattttgccgtgccttgatggccagtacatggtgcgattcacggacatcagcagcagaccggaccacgcccatctgtggcgaaccgtgaacttgatcgagaaggaatgcaacgtgccgacgctggcaagacctgatgttcccgtgtgtccatgcagtcaaagctgcaattcatcacggaatgcacgtgagcgagcttttcgcctggaaggaacacaccgtgtcggtcgcgcggtggacatattactaccagtttgtcccgaccgtccgctcggcgaccatcgctcaggatcttcaactgctagtacctgaagtcatcgtcactgaagctgacttagggaagcgtggcatgaagccgggtccaaagccgaagaacaaacgcaggtctacacgaccaggttctgcggcgtcgcctgccattgctatgactcaataatactagagctgcaagacgtatgcagtacagtcgtaagtctttgcaaaagcataacaaagcaaaaattacatttcgaattcttagtgtcaatacgtcgagaacggaccttggttttcttaaaattcttctcgtacgaaaatgatatcataaaattcttatttacctttaatagaacttggatcgaaggaaagtattatacacgtgatagttcaaggatagataatatactgcaaggataaacttaagtgaagatattatatctgtaatatcgtacgaatgtgttactttgatgcttactgtgacttgacgaaaattggtattccatagcaacaattcgcacgatcgtacgactttacttcccagtaatacaactcgttcttgtgcgctattattgatactgacgcaatgtaaatgaaagaagtatatacaacaaatttattatcatttgctgcttagaccatttcatcaaaataaagtgaaaaaaatatttttaattactcaaaaatgaagaaaataaagctgtatggctagccggatggctacatccgaatgggaactctacacgtagggcagttagctacatcttcggcctgaatgcttctcgccacgtacattgacatgcactcggcacacatggcatgtcagcatgagcgcggggtgaccggcgccactggcgcgtactagcaaatggcgcaagttgataggtcctcgtcttggtcctcctcccccgtaatgtcgatcaccgttgggggagctggtgccgagaaaacacgacgtcgtcgagcagagcggggaggtgagctctgagctaactcaatgtccccaggcacagacaggacgagcgactcaacaacagtcgtggtcacgtcacctgcggccgtagtgatgatacacaggtcaagctcgttaagcgcgtcacggcgagcgcggtggtacagcttatcgtactcgcgcttgtaggctcgggccttttccagtcgctgagcctttaggatcgggtaccgcttttccaggcacgcacgcttgccaacgagctgccgcagacttgagacagcccagttggtgttgcacagggggcagttggcaccatgatgttttcaataatgaggcacctacttattttgttatcgctgatgttccgtttgctcgtcctccatcatcttcatatcttaccctgtccttaattcttatcgcgttttcaagttctgataaaacgttatttttgaccgtggcaatctacttgcaagttgatgcattcacctacttagacttttacaaaaatgcttcaatctacttgaattacttaattcctccatatgcgcactacttattagggcatctccaccggtgctgagtaatactaaaagcaaattgccctaagatccgtgcctacaacggcacaaccgtgctaaagacagtgcacagctccaccggcaattgagactcgcagcaagcgcgttaaagctcttggttcggcgccagccatggcgacggcgcacagctgtatagccctataaagggcccggcagcacgttgaggaagacccagggatgacgtagcaagggcgacactgcggtctgtgacgcttgcgctgcttagaacgcttgacttggccctactactggtcggtcgacatttacatgtactcaaccttttactcaaagcctcctccgttggcaaacttgtgcaaaactttgatctgcgtaaaaaatggagcaatttgctcagcatttgctcaaaccggtggagctgtacaaaactaaaactatgattaaatattgacagaaaaggggttttactcacgaccggtggagatgctcctagtgctgattcatactctttcgtaagacgatacttagccccagaatgcctatcataagacaaagcgtcttacgttttccgatcaacgcgttttgactacaacttggttgttgtataccagtggctacattgcatattgtctgtcaaaacataagacagtttgtcggacactagtttgcgccatacaattggccaaaaatgttcaggtctgctcgccacgacagcggcatcgttgccgcggacgcggtggcaacgttgagcgccgaaacgatgcagttgcatgatgcggtagggtaagtagcctcctgttcacacacgaagcgatgtgcctgtagttggccgctggcagcaagcttaaatatcggcataatgactgcacgaacgcgtgcatgcagtccgtggagctgtttcactcagaggtgcagccgttgaagggcacggagttacgatgaagtttgtagacgtagactaagagggacaaatagctcgtaacggtactacatgtacattttaatgtagtaatttttatgcttgagcgtacatcatagtagttgtgaaggcgaggcagccagggaacggtgttgccagtgggcttcccgagatcctccgaccccctcttacctaatcattacagtccagcaacaaaatgcaaccacgtactctgcaacggcgataacacctagatattgtacctacgacgctgaggtgcggaggagctccacactgctgcgcgggcgctcggcgcgcgccatatcgctgctgggctcgaccttcggcatcggcgagttactcggtatctcctgcaactaagccactgcctgcagccatgctttttgtcgatgctacagcgtagacgggtttgcgtatgcgccctctatccgaatctccatcttctatgtagtgttagtactttactgtagaaaggagagtcgcgtggtggggtgaacgactgttgccgttcaccccagtatagcgaagaaacattgctccactacgggaacaaacggtcgtatgataactgtgctatgatgtccttacattccattcctggcaagtatatttaaatcttctagcaggaggttagtgcatggcgtcaggatcaaaagcccggacatttttcaagtgcgctgcctctagtaaagggggcaaaatgcgcacacagatgaatcagtccaatttacgagccgagatgcagcaacactcaaaactacataatacaatattatccaatgaaattgctacatttgatttgtcgtcaaactgtcttacaaatgctcgacacaagtgattgaccatccacgacttacagcaattcgtactcgagtacgatttatagtcgtgctcgataagtcgtacgagttattgtgctttgcacttattttgccgaccattttagacgctaaatatggcaaagcctgctcctaaatttgtgtgaaagaagatacacggcctgctaaaattatgcataaattcacctcctcatatatatatcgacttgggagggcctgtcagcagccatgcattggcccagtacaccaccgtccatgatccccagcacatccaccctcttatgcataattgccgtgtgtgtaggtgcttgtggataaaaaccgacagaattgcagctgcacagccacaattgcacttttgaaagtgcaattatggcgcttttagcgtaattctaggcctccacccatttatgcacctcgatttatcgtaaatctagcaggtggtcgtaataatacagcaaatctcgcctcatattgccaaaatcattgcaaagcacaaatacagtctgaagtgccaaaaagtacaatatgtgttattataataaacctggcgagatgtgcgcctaaatacttttgtccaataaaaacagaaactacatagtgattatgtccaattaaagcgaatatgtggtctacattaaagagaagtcgcactctctcgccaaaccgcaacactgccgctctgcagcctggagtcgaggagatagccgcattcgtggacgacagcgtcttcactcagttgagcgcgaaactgggggacgcgaaggaaggcaacgagggagcactggagaagaagcctcttcgcatcgatgagtatttgaaaaaatatcgcgacgcgggactccgggtctctcagaaagaatttaagggatacttggaggtgaagattgggatcgtatacgagcacccagacgtgacggtcgatcttgcggaaaccattacggtcaagacgattgaagacctcctggcaaagtttgttcccgaagacaaccccctcatcaccaagctgggtgaagacgaaatgattcgactctcggatgcgttcactaaagtcacgtacgtcggcaaggtccaagacgacctcgcagaatacctgcgggactgctggaaagagtacaaccctgcaaagtacaaggcgccatgtgtggcggttgtgcagagttccggcttcggcaagagtcggacagtgcgtgagcttgcgctcaaggcagaacgagaaccgaacttgaacctgaaagttttgtgcatgtgcgcgcgtgtgcaccgatcgacggggtttccggaggctacgagtaagcttcgtgattggctgtttgaccctgccgcctcctcagtgcaagaggtcgccaggcgattgaaggcgatttactgctatgcgaaagatcattgggcggacgttcagacggaatggctggagctgtttatcgacaatgcaactgacagttccgtgtgcggccaagcttttgaaagaaacagaaatgataaaggcgtccgattcagcatccgtaccggacacctttatccaaactacgggtacctccaccgtgaaggatccagatggcaaaatggtggttctggtgatcgatgaagcgagaagtctgctggctgaggtggatggcaagaagaacgattttcgtatgttgcgaaatgctcttaaatccgctaacgaagatatcggccccgaaggaggcattttcggcgtgctgactgatacgaactcgcagatctcggacctgacgcagcctctgttgttggacccatcttctcggaaatctggaggtagtttggcatcgttcgcgccgcttgtactagctgatacgatggacgcacactgggatgactactttgaagatgaagagataaacgagggaacccaagttgcggtgggagctgaagacgaagagaaaaccaaacagcaagaacgtgctaagatagccatgtacaagaccgtcgtaactggaagtgacggtcaggcctgggaggcgttgaggcgcatgggccgcccgatgtggtacagcacttaccccgatccagctcataagttcgcgtgattgatctcgcggcgaataaactgctactggggattcccccttcgcaaaatgcgtacaacaaggataccatgtttggtgtcgcctccatgctttgtcgactgggtgttcgaccgcattcgacgtcggctttggcatctcgggcccccgctgacttcatggcgattctcgcgtatgtgaacttcaaacgagagggttacgtcaccagctacgcttcggacccagtgctcgccttaggagcgatgaaagtgtggtatgaactgaaatatggtctggcaaagtatatcctgccgcaactcaagaacctccttttggatgaagcgttggacactggtggagttggcgaaattggcgagatggttgctcgcattctgctgcttctagcgatggacacgtgtgtgatgggggacaaagacttttcccagtggtgccacacgatcgggcaatttgtaccggtgcagcaattcttgaaggtgctacaaggcaagaaaaagctgccgatatatctcaagcggatgatcagcaaggagaatttgagaccagaattcaacaagtggtgctcgaagtgggatggttggtacatggggttcacccactttgtgcagttgcagcttgagccgaatgaggacacgctttggtttttgctggggcgtcaagctgcaggtattttcccccgtaaccagtatggagccgatttgttgatcccgatgtttaagaagagatccaacagcaggccagtcggtggggagacaacgaggggtgaacaagaggagcaggaagtgttgatgatgttgattcaagtgaagaatcgttccccagtcgatggtgggttttccagggcagcgacggagaaactatgcccctggtttgtgttcggaaagaacagtgatgggaactcgtcagcggggaaatctaccggtgaaattggtggggatccgaaaccgctgagctccacggatgtccgtgataccattcgcatctacatgaatgtgcgcggtcggaagagtgacggcaagttcatctatgccacgacaatgaaagacaatcttaagcccaagaagaaaggcaacgcctctgaggtgaaggaggagagtcagacgatcgggagtcaggcgaagaagcgggcgaagatcgagagcaatcctggcgtctcaagtgtgtcgagtgtctcggaggaggatcctgttttcacgatctgcctccgtttgctcaacagggtcacctacccgttcctgagcgacggcgtggcttccatgctatcaaacatggtggagtctcagtatgacccgctggggcttgtggagggcgacctggactatcgcgatgaagatgaaaaacgaaacaaggacgttagttcgtatgcaaagttgtcgcttaccgcgaagcgcgacaagttgttgcagaacgcccgtaaagcactagcgtacgcgccgggtgacaaggaagaagagtgacgctgagagtgacgttggtggcagtgnnnnnnnnnnnnnnnnnnnnnnnnnnnnnnnnnnnnnnnnnnnnnnnnnnnnnnnnnnnnnnnnnnnnnnnnnnnnnnnnnnnnnnnnnnnnnnnnnnnncagtgctcgccttaggaacgatgaaagtgtggtatgaactgaaatatggtctggcaaagtatatcctaccgcaactcaagaacctccttttggatgaagcgttggacactggtggagttggcgaaattggcgagatggttgctcgcattctgctgcttctagcgatggacacgtgtgtgatgggggacaaagatttttcccagtgctaccatacgatcgggcaatttgtaccggtgcaggatttcttgaacgtgctaacaggccacgaggagatgtcgatatatctcgagaagatgatcagcaaggagaatttgagaccagaattcaacaagtggtgctcgaagtgggatggttggtacgtggggttcacccactttgtgcagttgcagctcgagccgaatgaggacacgctttggtttttgctgggacgtcaggctgcaggtattttcccccgtaaccagtatggagccgatttgttgatcccgatgtttaagaagagatccaacagcaggccagtcggtggggagactacgaggggtgaacaagaggagcataaggtgttgatgatgttgattcaagtgaagaatcgtttcccagtcgatggtgggttttccagggcagcgacggagaaactatgcccctggtttgtgttcggaaagaacagtgatgggaactcgtcagcggggaaatctaccggtgaaattggtggggatccgaaaccgctgggttccacggatgtccgtgataccattcgcatctacatgaatgtgcgcggtcggaagagtgacggcaagttcatctatgccacgacaatgaaagacaatcttaagcccaagaagaaaggcaacgcctctgaggtgaaggaggagagtcagacgatcgggagtcaggcgaagaagcgggcgaagatcgagagcaatcctggcgtctcaagtgtgtcgagtgtctcggaggaggagcctgttttcacgatctgcctccgtttgctcaacagggtcacctacccgttcctgagcgacggcgtggcttccatgctatcaaacatggtggagtctcagtatgacccgctggggcttgtggagggcgacctggactatcgcgatgaagatgaaaaacgaaacaaggacgttagttcgtatgcaaagttgtcgcttaccgcgaagcgcgacaagttgttgcagaacgcccgtaaagcactagcgtacgcgccgggtgacaaggaagaagagtgacgatgagagtgacgttggtggcagtggtgagggccactaggcgatcaaggtggcgagacggaaacatccaagaaacgagcacgtgaaaaccaagaggatgaagaagccgtcccactaaacgcgccaagtgatccaacaagacgcccaagcccacacggaggcagtaacagtacgtgcctggtgcctgcagcaactagttttaactaccaacaatttgttttacttgagagtacgcagccacctccagtgcgcttcaccttgcagtcttacggaagtagcacgtcttttgctgtctacgtcgtctttactgctctacctactcgtcctgcaggaacgggtattatagtccgtgtacccgcgcgcgtcgccgaggtagaacgtgtccgtgtcgtagtcgttcacgggcttgttgagttggaagcgccgcaccaggtccgggttcgagatgaagtggcggccgatggccacggcgtcggccgcgccctcctccacgatctgcacggccgactgccggtcgaagcccgacgcggcgaggagcacgcccttgtacgtctcgcggaactgccgcgccgagcccttctcgggtgccagcgggtcacgcacgtggtagccacgcggctcgatcaggtgcgcgtaggccaggtcgtagttgttgagcctgttcagcacgtacgtgtaggtggcgacggggtccgagtccttgtcgccgaagctgccgccgaacggggacagtcggatgcccaccttagacgagtccggactctcgaggatggcctccagtgcctcgaacaggaaacgcgcgcggttctcgacgctgccgccgtactggtcggcgcggtcgttgatgccgtcgtgcaggaactgctccagcaagtagccgttggcggcgtgcagctcgacgccgtcgaagcccgcgctgatggcgttctccgcggccgagcggtagtccgccacgatgcccgggatctcgctcgtctcgagcgcgcgcggcggcacgggctccatgcgtccttcgcgcgtgacgatcttcttgccggcgcgcaggacgccgcccggctggggccgatgcggcccgtgtggtcgtatcttacctatggtatgtaccgcatcgctgaagttattgttcgcacatttattaataccataaagcgcactaaacacttggtggcaatttggccggacttccgagacaacactaggaggattctggaagcaaaactcgggcattattttcaagaagaaatactctacttttgatacgtagccatgtatttaccaaactacgcactgtacgggactagacttgattgaaatttgtgactgggtttggcggtgctttccaatacaaacatcaagtataaaggatttgtattgacccggaaaaaaatcgatcgagttttctggtacatgttgctgaactgagcaagcccagcatcgctaccatgttgaatagacgccaatgaagacactagtcagctgacagcctcaacttacgagtatagacctctccacactgtcaaacaccactcttctatacaaattcaagatagtgcgtgtctccattgaatcttatcaaccgcgtcagcttaaccttatttgagcagcttactacagtgaagtgcgtcgataaggaacgggcgacattttatattctacgacaagacatgaatcctcgcttgtacccattgtgtgccaattgtactgaattagttatatgattctaccaatcattcggtcccgtttaacattccgccaatcacagttccgaaaccgagcctcaagagcggctggatggagcggctcccaagtcgggggaaatggaacctaaaggtcgcgagagggaatcatgagcatgaggatcgctgtgagcgcgggaatcgcgccaggtacatgtctgcatgcctcattaaccaactttcgctctgctgctcacaactcccatggtgaccgccacttccagaccgttccagaggtggctacgtctgaccaagcttcagccgctgctaatctgtcatcgccgtcgtgatctaccgggtgctacctatgctgagttggctgcgtgggttcaagcctagactctggtcgcgaagtccgacatgaactacatattgcagtaaatcagtgcatttgctgtctgcatgtgacgagtcaaacctttaattatcaatatacctttttctttcaatgtatatcaggcgttccttatcgacgcactttactgtaccggtaggcgttattcgagctgttcaatggttaagcctcatgtctacaaaactgcgaaaaagacgtctactcagatgccagcaaacggcttcatcgctccgttcgacctgaagctggatcgactgattgaaggcggaaacgttggcgggaactaccgtgccaagtggctagacgtcgatgttgcagtcaaactgtttgttctagacgccagcacgacaacattcgcagacgaagtggcagcgtggcaccagctgcgccacccgaatgtgatcagctgtacggcgcgtgcgatgtcggtcaccacttcttcgtctgtgagtgggccagcaacggaactctcgttgaatatcttcgtgaatgcgagaagcgtgggaaatatcgcacgccgtggaagtttttgtatgaagctgcgttgggcctcgcgtacttgcatgaacgcaaaatcgtgcacgggaacttgtgcagcaacagtattttgatcggaagtgatggtttggccaagctggcggattttggagtgagtggcttgattttagacgggtatggctccgttcgctggcaatctcctgagcaggtacgaggggaggaagtgtcgttagcttccgacagttattccttgtatctctgtgctgtggaagcggtaacgggggaggtcccgcggggacgcatcgatgatgatagcatttgcaagatgtggaaggcggagtggaacgcggataacgacttttacagtcctgcccaatccggacgtacggctgatctttctgcgttggcacccaaaatgtgcggtaatgatcctaatacacgggtgtctgcttcagtagtggttcaaatgctggagcgcttagcagctcaagaattccagggacagcaacgagtgcagtcaaacccggagccactcgaacacatcgacgactataaatgcggagatttgttgtaccaatggcaaaaattgggagccttagcatccaatgttgagctcagtcagccccagcacgctgttattaatgagctggaaacactctatgagagcttaggcaacgcaaatcgacagctaaaggtgctggatcaattctacaagcttgtcatggattgcatttgcgcaattgacgtggagtctcaacaaaaccggatccttcgactctcgtccactcgagctcagggaagcaacatcgccgctgcataacgacgcattgatgctatttgggctgcgattgacgaccctcgttccatcagcgaagagcaaaaactgcgtcgagaggagcagcacgcgatgcagatgaaagcatttgtttcggtctcgcagacgctaataattttggacgagttaaagacggaagatgaacgcaacatcttcgtggcattcctgaagagagagatcgactgtcacagctccgcgtactcggcaggtcaactgaccgtactcaagaaggctcacgctgacatcagtgcacggctccagtcagacgcggtggtatcgactcccaagtggtttctaccttggtacgaattggagtttgacggcgcgagttacctggcggaaggagcgttcggtacagtttaccgcgcgaagtggctcgagtccgacgtggtcgtgaagcaacttaagcggacaaagtcgagcgatgagtgggctgatgacagcttgttggcttcgactcctgaaacagacagtaagagacaggcacgcacggagactcgagagatgtttgaccgtgaggtcaaggtctggttcggtttgagtcatccgcatgttgttcgtctgtttggcgcctgtcacattggaaccccttcttcgcttgtgagtacgcaagcaacgggtcactggataaatatctgcgcaaaatccccatgagatatggcaaaagctgcacgaggctgccctacctccactcacgcggccaaacccatcgcgacctaaaatgcaacaacattgttgtcggcggtgataacaaggccaaggtgacggatttcggactgagctctgccaatgtcgtaactggtgcgtggcgctgggtagcacccgagtgtctaaaggaaggatcctcggcgctgtcacttgcatccgacatctacgcgttcggaatgtgcatcgtggaggctttgcgcgttgtggagattgctgccatgaaggataaccagaacggtcgtactccacttccatgggggattcttgataattgtgcagtcaagcatcgtgtgacagtttttagggagctgccgtgtcgcccgcagatttgtacgaaggagcaatgggagctggtgaagcgtatgtgcgcgtatgagcgagcggatcgaatcaagatcagtacggtggtggacgagctcgccgctctgacagatgtggactcagctctagagcctgaaccagagtcagcgaaactctcaagagagcaagtcgccgggctatttgaaggaatgaagcgctgctgtcgtcttgagaacccgggagcgctctccacgaaccaagttgtgctgcgttcggtgtatggtcttctgtgggatcggctgaaggacctgtgcgctacagggaaatgtggatctggagtttttgatcagattgaagcgcttgttggccgcgctcgggtgagcacacagcgactggaacaatgccctgaaacacttactgctttcaccgagaacgcaatgaatgggtacgctctgcatcgtgagctggataaagctgtcgacgccacttctggcgagttaactctgcaagtggagaagaactgcacgactggaggtcaaaatgctacgcagttctgggagcaccagggtttcaggaacacattggtcattcaaagtaagcaattcaggcaggtcgaggctatagcaagcttatatttttcagcatcgaacagtatacactctacaaactgtaaattgtctgtctgtacaagcaaccataactgcccagttctactgtagcgggtttttgagtgagcagaagaggtcgtccgacaaaacggcactaattgggagaagttatccttcactttcgagtaacaagtaaaaacatttgagtttacaccctgtatcaatttgcaactactgactccactttaataaaaagatgttgctttttttgatgacattcatgagcatgaataaggtgctgcagacacttagccctcatgaagcactacagtgacgccgcgttgtttcgcagttcgaagaactgtcgattggggaaggtttttggatgacattcgcgctacattcgtagcttccggatgacattgaacaacatttatgcttcacgggaccgtcggcatatctccaatcaacatagcgatctgatggatcgattgatcgatatatacaccttttctcggtctacctgagctaattagacaagcaaaggtggcatgttttagtttggtgtgcacaagaagcccaaattaggaaacggaaatctgaaattgacaaacaaagctgcctaaccttcattcaatgtcaaatggtacagtgtaccaaaaacgctactcgccgtacttcatgtcctccatgcggatcgccgcgacgacaaaattcgctgcgtgaagctccatcctctgcaccatcgcctgcgtgatgcgcggcatgctcacatgcacagcacgctcgagcagctgcatgcgagcttcggtctttgagatgcgtggcccggagcttgtaggctgcgttcgggggcggttcatctcgtcgcgcatcagcgccaggtactgcttgatgtgcgccttgagagcgctgaagcagttttcaattgacttgcacatcgagctgtaaggcccgaggcgcagtaggacgaggtcgtcatgagcaggcaccagcgcttccgtctgggaatgcgctggggcgttgtcgaagacgacaacgatcttcttgtcggcgaactcgttcttgtagacgaagtgtcgtcgccctcgtcgccggcgctactcttcttgtcgtcgtccgtggggtcgttggcgcccgaactgcggtcttcgtcggcctcgtggtcgtcctgctcttcgtcgtcatcctgatctgggtcggcctcggtctcgggcagatgctcgtccaactcgtcgcgcacgccgtcgtcctcctcgtcgagatctggcgtcgggggcagcaccgtgaacatgtcttcgtcgtcctcgaagtccgagtagtcgttgcgctgctccttgtcctcgtcgtacgccttctgggcagggaacggttgcttgcccttcttcatgagcggcttgagcttcttggcgagggctcggatgcgagcgtcccccagcagaaccttccaggtgccggcgctcttgttgccgacccaccacgggttaggcgggctgccgccggtgacgtcgatgacgatgcgggcgagggcttcgtcgctgaggcgaaggtgcgctggcttggtcaggttcagcgcgtccgtctgctcgaagagatcggagatggactggtagccgtcctcgtccacacggtacggatcaagggcacgggcggtgatggcgtcgtagcggccacggtcgttgcggaacagcgtggcgaggtccgtcgccgccgtcgcatccgagttaaccttcgcgttcgccttcgcggccaccgagcgccaagctgccttgccgcctagccacatgaggttgtcgtgggtggcgttctcgaagacgttcagaaagttgtagaagccgagctcgacgatgttcaggctgatgaaggcgagccgtgcctggccggtgttcgacttcttcttgcggcgggccgtgcactcgccagaaggcgcgtacagcgcgcaggcgaagaagacgtcgcgccagtgcatccagacgcgccagtgcgccacgtgcagcgcagggtgctcctgagggtcataccaggcacgctgaccggcccacgggtacgccatgcgcggaggagtcttgccctgggtgcccgcctgcttgatgatcttggagatgtcgcgacggatggtgaccgggcacttggcgggtagcggaaactcgtactcctccgcgctgtcgccctcgggggcaccctcctcgtcgtctgcgtcgtcttcgtcttggtcctgagccctggacttgcgctgcttcttggacggagggggctatgagacgctcctagtggtcggtcgctagccagacgagcgtgcctacggcgcgggtacggtgaacaggtcatgcgggggcgcagcgacgacgtgcagcgagtcgggtagcggcagcagggtcacggtctctagtagctcgacgggaaagagcgtgtcgttggctaagacgccgacggcgacggcatccacggcgtccacgttcgcggagccgctgttggcgaagagcgtagcgcgcaggcgtacgtagaattccacttgggcacggagctgggcatcggcttcagcgtccgcgccccgggaccggcgatcgaggcgtgcgcgcagccgtcgcatgacggcctccttgttgacatctcgcgacttcgccatggcggaaggtggtggctgaggcttcttgggagtcttgttctcttctcggcgaaagctgaaatgagggcgagactgcgagttgccgcggcctctgctgatgcgttccgacctggtagtttggacgtttggctgcggatttcccttcctggaaatgggagaggcacggttggcgtgagacggtcgagtgattgactaagttgattgacgagacttgcgacggtgggttacccgatacggttggacacatacgaggatggttgtgaacatggagtgctgtggatgaccgtgaggagcgaaccgaggcgagggcatttcgctttcgtctccatgacgaacatggaaaccgtgacggacgttttcgagtggtgcctggggcactccctgttcgtgtggaagattgtgtggtgggtgctgcgcaaacactggccggccgtattgctggtgctgattggtgcggtgggcggcgtgatctcgagatccttgtggagcattgcggggcgattgatcggggccgtgttcggctttgtgttcaagtggctgacactgttgaaggtatgcgtaagacggtaccgtctcttcgtgaacggtccgtctgtgcaaggcagaccgtccgcggagcgtcgatggaaggcgtttgaggcaatctgggccacgcccatggtggtgctcgaggcccgaggtgaacataaggatgggcgtgcggacgggtgcgtcgggaaaccgaagccggtgcgtaccctgagtgggctgagggcggagcagcgtgccctgcacgcgaagatgaaggcagacaaggaggaagaggacgctcgacgaggacgtcgagtctcagtcggggaggatgtcccgagtgggaacggtggtcaccgtctcgggtacggtcgcggccgtcctctggcagcctgtcaatcagcgcgtggactactactcgaggatcagctgttcgaggatgagctgactgagcagtcatcggactttagcgaggattagctggcggcgggccagttgcgtggacgaagagtcgtgacggaagcagtggcgtgttccgcgagtaggcggtggcgtgaggagacaggatggaggtcacgagcgctgcgtggctcggggcgtgagccttgacgtgagccaagggcggaggggtgaaaggaggtgaccatgggttcgtgtgcggcggtgtgtcgacgctcaagttgaagagaagcaagagagagtgcggggcaaagtgctccgtgccgggtaggttggtcagtcgtgaatttgccgtggaaacaacaagttaaatctttgcatttggctctgttgtatttcataccgttccttacctgtccgtaccgtcctacttcgttctcgcagcggcagccgtctcttccagggcgactcgcgacatagtaactaagtgacaatacacgtcttcaagaaaaagaaaaaaattcaaagcctgttcttgctgggaagtctttttttacttaatactagtagtaaatacagtatctttccatatattcttagctcagcatcacaccaacgtgtgtgcgaactgaatttctctatcatatgcatttcgtaagcatcacgtcgacacatattgcagcattaataccccccaaccagtgatgtcagcttcttgccacgttatcgtccactaaccgcgcttcttgactcgaatattgtgttatatcaaaccatgtgctggcaaaaccgctaaccacaggcatcttctgcgcctgctttgcagccgcagcatctgcgaatattagaaccgtccatagagttgtggcttaacccccaacgcgcagttgcacaagttgtcgccaactactgtaccggacactaaagtatataacgggttctatgctaacgccaactagaagcacacgcgttcactttacttacttcgaacgaagtatagttttcgattgtgtcacatcggcatactgcatctgagagtctttcttctaaactatctgtctgagaacaaccaatgcagaacttgcactttcaggataaaacaaatactagtagaaaaatggtctcccagacaatgcgcagcaaccttgtgaaaacatagaccttgtgtacaacgcgctgaattctcgctggtgttaccggtcagtgcctaaattgcacaggacgtcaacgcttcttttttttacagcacgctgccgccctatcactatcgccagaccctaaaattacgaggattgaacgcacccacagctacgtaaattgttgtttttcgtaattttcccagaattgtcgcgtggcattacctcacacaaaatcctttagctatcccagcctacgcatagctctcgtatccccagatgcgtattagatgtgacgagctgattaatatcacaagccgtaaaacctagatcaattctcagcacaacatttaatgttgcagtcgcgtacgtagccttgccacatgcacaacagatctcgatggagatttgagattagccaataggctcgctcgcattttatccccagacaccgacggagatacagacaacgacggaaaaatccggcgtgactgactgccatcctccatagttaaggagtgtaacacaaaatacggcacagataaaaaagaaaaacatgattggctaaaaggttgcgtaactgttcaaaaacaaagcacaaatccgaatgttctgcaaaaaagctgcattttattcaaatgctaatctcaggatactgaggaatagctgccttaaagctccgaattacagtgctttcggggattgcatcccaagcagcaatcgtagcgtgaacggcacggagccgcttttccttagcactgccacccgtgatgccagaccagttcgagcgcaactttgcctttagtggccccattacaccgacatccagcggctggcaagcagtcgtgctgtttgcgggtagagggaccacagtagcattagcaacttcggcaacgacccgctgcccctcttccgacacatgacactcaaagttgtcaaaaaggaggacagcgggtccatcaacttcatattttaacaatttttctacgtaaaaacgccacgtaacagcgtccatccaagcgttctcttggacggtgtcgaagtgcccttccggatactcttcgaactcaaacttaccatcagctcgaatcgtgagcacagccgtcatgcggccggtgtgcttggacgtgctcgcaatccgcgcagcgtcccgccgacctctacccgcccacatccgagccggaggcatgtaaaatggatggcagtctcgtccacgttgtacatgccctccggcccgtacgcggcgtgcgtcttccagaagtccagcgcgaactcggtgcacgtttgctctagctcctcggtgcttttctttgccgtttgtggcttctgggaggtaaaaccatgcctaaacacgcaaataaaggtaaatgttaggaaactgatggagttttagcaaaaacaaaattatttaccgaattgcgagtctctcgaccatgcgctcaagcgccaggatgtccctccacttcctttgcaagtagtctcgacccactcggtctcgattgcccacatgaaggacataatgccacgtgtagtgagggcctgtacattatagcataaagtttaacggttaaacgctacaaattatgagattctaaaaaaacaaacttacctactcttcgcgccgcacgtcctttatgaaggtgacgaccgcaggaaggtcgggaaatacttccctgcggccctggcccttcagggacttagaggtggagtggccagtgaagctaaaaagcttttcagcttgcttccaccagccatggacagtgccccgagcaagttggagctcgcgggctgcctcctccacccctacatcttcgacgaggcggaccgcttcgcgcttctggcggacggtgtagctcttctgcttcttcttgggcggcggcgtgtcctccatagctcgaaaaacagtttgagcggctcagtcgaccagctccaaattagnnnnnnnnnnnnnnnnnnnnnnnnnnnnnnnnnnnnnnnnnnnnnnnnnnnnnnnnnnnnnnnnnnnnnnnnnnnnnnnnnnnnnnnnnnnnnnnnnnnnnnnnnnnnnnnnnnnnnnnnnnnnnnnnnnnnnnnnnnnnnnnnnnnnnnnnnnnnnnnnnnnnnnnnnnnnnnnnnnnnnnnnnnnnnnnnnnnnnnnnnnnnnnnnnnnnnnnnnnnnnnnnnnnnnnnnnnnnngcttctgggaggtaaaaccatgcctaaacacgcaaataaaggtaaatggtaggaaactgatggagttttagcaaaaacaaaattatttaccgaattgcgagtctctcgaccatgcgctcaagcgccaggatgtccctccgcttcctttgcaagtagtctcgacccactcggtctcgattgcccacatgaaggacataatgccacgtgtagtgagggcctgtacattatagcataaagtttaacggttaaacgctacaaattatgagattctaaaaaaacaaacttacctactcttcgcgccgcacgtcctttatgaaggtgacgaccgcaggaaggtcgggaaatacttccctgcggccctggcccttcagggacttagaggtggagtggccagtgaagctaaaaagcttttcagcttgcttccaccagccatggacagtgccccgagcaagttggagctcgcgggctgcctcctccacccctacatcttcgacgaggcggaccgcttcgcgcttctggcggacggtgtagctcttctgcttcttcttgggcggcggcgtgtcctccatagctcgaaaaacagtttgagcggctcagtcgaccagctccaaattaggcaatggcacacggggatttaccagagccattcaaaaattaaatcgcggtgattggcttatttttatgaataaaataaatttgattggacaaaatcatcgcttgttttgtatggacatgtctatggaatgccgggttttgcgttgccggatttttccgtcgttgtctgtactgtagccaaccaactgtggattcaggttgtgaacttagtttcgccacgttatctgtgcttgggttcttcctcgctaccttgatcatccattgaatgggacatcagtatagttttggtgaattggctcgtatagggattcttgcttcttcgggttcttcttgttataatctttcacgtacttgagccacttcgtgaacaccgggtcggcgagaaggttgtcccgcgcatggtctagaatctttgtacggctggatctagactctagatccagccgtacaaagacatccagtggggattcgttgtttgctaagtacagtagctcttgatcttctgtgtctgaattcgaggtggttagagcacctttaatgcgacagcacaacagcaccgtaaattaaaaggcgcctaaggccctggtacatgtacacgaattggctccaccagcgtacagtagctaagcttcactgctgtgcattttgccttctttaccatcacatcaaccagtgtgcctgtccttatcaccatcccaagagttcgcaagcatcacgccaacaaatcttacggtagtgtaacacccaagcagagtcttgtgtagccttagttgcggctcaatgccttagatgtatcaatctgctttcagttcgaaaggcacttcgtcatctccaaatcgaacaatgcgcctccacggcgtggttggcttcgccttgctcatcgtcgtctcgatcacacacactgtagcggcgtcattgctgaggaacggtctccaccctgcgagcgaaacagaagggagattcttaaccacaagcgttgccaacaccagactcaacggcgacgatgctgagagagcgggactgtctgtgcctgtagtcgagaagatcaagactttcttctcctcatcgaaagtgacaccggcacagcttggaaatcggctcaaggaggggaaatcggccgacacggttttcacgcgactgcgtctgaacaaggctgacgacatgctgctctactacggtgatttcgtcgactggctcaagtacgtggacgatctgagcgcaaagaaccccggcaagaaaatgtctgcgatctcgacattgacgaagcagtacggcgacggcgatctgtacagcataatccaagcagccatgaacgtcccaaggacaaagagcatcgccacgcgactacagaccgagcaaatccagcattgggtgaccgctggtaaaactccggacgacgtgtttcacttcatgaagctggagaaggtggagcgcaactttctaagcgacccggcgttcactgtctgggccaagtacgtggacgatttcaacgcaaagtatcccgagaagtcagcgtccatggtccccgtgctcacgaaataccacattaatgaggtcactctgttcgaaattgttcaggcggcgaagagtatgaaaggaaccaaagccatcgccaccaagttggaggatcaactggtcaagttctggctaaaccgtcgaaaatcacccgatgacgctctggaagacctcgggctcagctacgcattggattcgctgctggataacccgctattcaacagttgggccaagtacccgaacgcttacagcacgaagcatccagaagagaaggcaaccgtgatcgagaccttaacgcggaaattcagtgatgataaaggtgcgagggtgcttgctgtggcaaaaaccagcgttgaaacgcgaaacttggccaccaagctggagtctgcgcagctggagatgtggcagaagagcgggaaatcggtggacgacgtgatgctgctgctaaagctccgaccaaacgctgactttaccaacaaccttctgctccgcacgtgggtctcatacatgaacatgtacatcaaggaaaatcatctcagggcgcctgagatgttgccaaaattggagactcgcttcgaccagagaacgatgaaccagatcctcctcgccgcaacgcagttctccagcatgaaatcgaccgcacttgcaatccaaaccgagaagatcaagggctacctggcgagcaatcaatcccccgaaaaagtcttcaagctgctcgctctcgacaacgtggggaagaaccttctcggtgatcacgtgtttcagatgtggaggaagtacgtaaacgatttcaacaagaggaacccaagacagcgagaatcctggttcacgcccatgcgcatgacgtacaaccccgctcccctcgatcaaatgatctcggtcgcgatggaaagccctagtaccgtgaacattgctaaactagtggtgaaggagcgctccaagtactggctggatagaaagaaggccccctggcagatattccgcgatctggagctgaacggtgctggcgaaaagatttttgccagtcccaacttcaaaatctgggccaactatctgaacaaatccaaccagcggtaccgcaaggagaagacgacgatgatcgatggactccgggccagctacaacgacatcagcctcatggggatccttgcggcggcgaagaaggagccaaagacgaagaaactggcgacagacttggagaatgctttggtcaacaaatgggtcgctgaaaaggagcccctggcagtcctacagaagaggtttgaccatgtgccaagcagcggcgaattgctcaagagatacgtcgcgaagctcgatgcgctggcagcaaaaggcgcataacagcagcgaagtccgaggtgaaatgctcgtatatatgaacattttagttcgcgttttgccgttattttcgttgtagctggtagcgtttttatcagttcaggggcagttcagttcaggttcaggtcatgcacaaaactttgctataacacgactgtcaaaagataataaaggcacgcacatgataatgtggtcgcatggtttctaagacagatatatctgggggggaataggtcaggttacctctactgaacaagtaactacactacacttgcaggttggctctaagacgagcacgataagtacacagctccactattggctgccatagtcgagcaacagcaccatcaacacggtatgccctgcatcgcgtcactcatgtagagacttagcaacgcgttcgttaacggctatcagcacccagaatcatcatagtaagcccagtacaacgcttgagtacaggctcagccgatttgtctgcaatagccgcatcgacacggtacaaacaccgtgtactttagtcagcccttcgatcaactgcgaacatctgcaactgcaccaacacggtacacacgccgtgttcgctctgtataccgtttgagtacaggctcaataaatcggtcaacagcacttcactcgtaaagtcaccacaagtatttaagtaatgcacatactacgtgggtcgcagcactcagccgagccggcccccaccgcttgctcaggggtcaagttacagcaattcggtacggcagcacatcacagaagtggcatgctgtcaagcgcggtttttgagcaacaaccatcaacaacactgccgccatgaagttgccctacgatgcacgatactcgagcgcaagctagcttgttgctgctaacaacaactgtgaggtagtcgtacaggctaagagcctacgcccagggcgaaatctttgtaaatacactgtgtgcaggcgaatacgatcaccctccgcccaatgccaggctcagcgcgtcgtagccataccagctcaacacactgaatcacctttttacagcgctcagcatcagcaccatggtcgatatgcgcggtacagtcaatcaaaacctggctatatacgcgctatcccccccaagcagcgggtcaagacaatttgattgagcactgcattgacatttacagcttccgtaaagctatagaagaagcaaggtaagccgtatgcagctaccgagggaaacgccattagtggcgatgataacaccttcttaatgcagagtgtgagcaggagtgcagatgaaaccatacgcgggcttcgtgtccaagtgcaagctagtactaactatcagcaccacggacgctaataatacctggacaaagagagaactcgtttcgactaataatttataagggaatgtgtagcagcagcatacatacgcaccccgcagaacattttcttgcaaccctcccacccgattccggggctacatgtagtctttcgcaaccctgctcgttttcaagccacaacttagacttaaacgagctattggttgccctctgtgatacatgtttgtacatcattgaaggactgcataattacacagtgtaattaattacaccgtgtcatgtgtgattgattaccttgatgcatgtttccaggcggggaaaccatccgacgatttgagcatgtgttgttagcatgacctaggctgaactgaactgccgatgaacggttttgcgctcttccatttgcgcctatgcagggtgaacaaatagcttacctagtacttggtaaatcagctgatcattttgagcttcactttggagggagagcggcattgatactgtacgtacatcattctgtttgccgttatcacacacgggtcaagcaacatgccgatgtgcccgtagacatattgatggctccagcttacttaccgtacacattcatatgccttactgaccgtacacattcatccatatgaaatagtgtagtcgtctcaagcctcgatgtctcttaatttctcactttgctttgaaacaagaagtacagtcttcggtcctcgagaagaaccatgtatccccagtggctggtgggcatggctctcctggccttcgccttcatcacgcccatcggctcagacttgtctgtgcgaggctccgcaggactagcacccgacttgtccaactgggctggtactcacactgcgatcaaaacacgggccttacgaactatcgacgataacgaccacgaagagggatcaggaggactgtccgtcctgtcgggaagaaagtcaagaaactgctttcgtcttcgaaggtggctccaaacgctcggcgagggaaaatccgccgacgtcgtgttcgaccgtttgcatcttaccaacatcttttcaagcacagtgaaaatcgctgaaagggtggagagtgcgtggatcaatctgtgagtagttcaaggcagcgtcgcagtttacaaacttggtgacaaaactctggccagttcgaaatttcaggcgtgggtcaagtatatgtcaatcaacggcatctcacttaagtttactattgtatactctagcctagcgtaatggaggctgcgctggggcgcagttctctcgcaatcccaaatacgctgagtgggcgaacggtgtgtttggcaagtcttctgcgctcaaagcaacaggtactgagcagggattggaaaaaatatattggtccaataccaataccgccatacgccaatacaatacgatactgtattgcagattgtattgcaatacgatattgcggagtccctatgtattgcaataatatatgtcatgtaacgagcaatactatattgtaggtgtatctcaaagccaattcactgtggtggagctagttcactctggagaagtgcttgaggcagcgttcgcggccctggcatttacgtatcgctatggcaaccgttttgctcgcccaaagagcaggatcgacgctaaggacgcgcgttatctaggtgaagactactggacacgatgctgcttgtactggaggggggaggaatgaagtacgaatgtagtgagttggtctctgcctcgttcctcctattccaacaccttcgggcaaaaataacattagccaaccttgaaccgcgcttccccgtacacttatcacaaggtacgatggacttgaaccttcacaggcatctagttgaccacttcaaacagatgcgtagtattgcaatacagctttgcaatacggtattgcaggcgaacggtagattgcaatacgggattgcggtgaaggcatgcaataccaatgctgtattgtactgcatggtggattgcaatccatactgcaatgcctactaacgctgaaaaatgctggccaatatattttttccaatccctggtactgagcccaagcgcctaaagctccgtgagctgaccctcgggagctttgctgctgtcttcgcgagaatgacgacgcccacgacaagcgtggctggtactccgcccgcagcgagtaacccgcaagcgacgagtactgcgacaggctcttcagcactagcgagtgctgctggctcgacgacggcgactacaactacggctgggatccatcttggtactgtcgcggcgactggtggtgcggttgtgacgtctgcagctactacgacgagtctccaaggtggctttacgttcccccgcgtgcccaacgccgctggtgttgcgtcgtccctgcccctgccgacgcctggagttgtcgcgcccgtgtcgatggtgtatggaagcagtgtgccgtcggtggctggagtatcatatggctattacggtggatatggtcatcccgttccgtctagtggagtcccattgtatcctggagctcgtggttctggtggtattgtgcctggtattaaggagatctctactaagccacctaatgaagggtagcttcgacttatatgctgtgcaattaaggatctttttgactagattgggactttggggagttgtcgacggcacggacgcgcgcccgcttttcgatgtcgaggcccaggtggcttttgattctcgcgacaatgcagctcgggacgcgatcttgcgcggtgtgccggaggtggatgtagagatgatctgtcacgaggcttctgcgaaggacatgtggatcagctttgagaacaagcagaccaagcgtgagtacgcgaattacatcttcgcccgtgagcagctctattcgaacaaatatactcgtgatcagaatttgagtgactgatatggtagaatatcatcaaatctccgaccgcacttaagatgataggtatacaaatccccagtcaagcgcggtcggagcataaccatacacagtccaagatagatttgtcgtcccgtttgctcattggtcggagccttgggatggatggcacggagcgagcgtagcgagcccccgcctgcggtttgacagtccgtgtgcgtagcacgcggctgcaaacccaggacccagcagtgctctacctagcaagcggaggcgacgcgtgcgagcttagggttctggcccagcgagcgcagcgagcctttaggggttttaggttcgcgcgtagcgcgtagctgggtgatagttaaaggtgacccccctcctatccgcatgttttgtgtacgagtcggagaaagtcggagggtcggaggtttttgggtatggagttgcagtggcgtgagcttcagcattacggcaaggtgattagtgatgaagaatttgcagagatcttgcttggcaatgtgtcgcggactcaccgagaggtggttcgccagttttctcggcactatgcggttcttgccgtgccagacactcaccaactggctccgacagcagcccaggtcatgaatgcgctgcgcgcagaggaggatctggatgagaaggtcgctgaggagatgcctcaatccagcattagctcggcgaagaagaattcgagcaattcttcgggaaacccaaactccgacaattctggcaagggtaatgctggaaaaggaaaacgccagcgaggccgaggtcgctacaaggcccaaggcaaaacccaagaagggaagtctgctggaggcagtggtggcaagaggagtgatggttgctggaactgcggcgagctcgaccacattcgagctcactgcccctactcaaagaagaatgatgactcgcaagggcagagaccgtgtgctggcatggaggctaagcggttccagaacaaaaagggcggcaattctggaggagtgacgcggagtgttgatgcactgacgtagcgcagtattggcgcgactgtggtcggttgtaaaccccgcaagtccagtagcatggagtgggtcttgggcacagcgacggacgtgcatgtctgtaaagacgcaacacttcttgtcaactcaagaccagacaaggagcccatcttcttggacttcgatggacaacccaaaggacagcgagtggtaggtgaagtgcgcttactagtgactaatgtgacatccaagcaggatgaagagttggcgttgcatggtgttgtccataccccaactggaccggataatttgctgagctcgcatcagctcgaagagagcggatggagcatgagcttcacgcagatgaacatgaaacggatttgttggctggagaagggtgggttaaagctgtctatggtaaaaacgcgtggccgctatcggcttcatgcgatacctgctaatgaacgatcgagtgttatttcgttggcggctgctgatacgaagaacgtagcggtgacggctgctgctacgaaaaacgctgcaacgaagaagaagaacgctgcggcacgctggcacatgcgcttcgcacatctgaactacccagctctgcgtcaaatggcagcgcaagagactgtggttggtttagaggaactgtgtggagatgcaggctgtccgagtagtgaacttgacggcaattgctggacgtgcaccgcctctaagctgaagaggatgtcatacaagctgacgcaaacgagacgtgctaaagagccgttccagaagtcgatgtctgacatgtgcagcatcggtgaaacgacgtacgatggctatcgctgctttcagctcgtgatggacgaggctacgcgctgggtgtggggctttcttatgaaggcaaaagaagagtccagaccggtagtcgtcgcacacctggagtggttactggcgcaaggcaagcacattgaagtattcggtacagaccaaggcaaggagctggtcaataagaagctgaaggcattcctcagtgggagagggattgagtttctttggacgaatgcctacagcccagaggagaatgggctcgtagagaagatgaacggcgttctcgaagcacgcattcgcagcttgctgacgacagccaacatgccgtggatgctgtggggtgaggcgttcatgtttgctgtggatgtgtcgaacgtgatcccgtccaggggacttggaggtgataccccatacaccagacggtttggtgagcgtccgagcgtggatcaactgaaaatatggggctgtatcgtgcatgtgttcacgcccaaggttctgtaaactggagaaccctggcaaactgggactgtttgttgggtttgcaaagcattcagagagtgtgcgagtgttgaatttgaagactggtaagatcgaagagaagcgttctgttgttttcgatgaaggttggactgttgagcgttcgtacgtggagaacctgctggttaacacgtatcggaagggccgcttcaagcttcctgatattatcccgctcgtgcgacttccggtgttagcggcagtgacgcacgatgagctggctgctgtgactcatgaagagttgactggtcctcctgcaaagcgtcgccgcctttcgtctactgctagtggttttggctctggtgttgtggtggagcagactccggccagcatgggttgtcctgtggctggaccagtgagcgagcctccagtgggagtggcttcggctgctgacccgccgtcacttataagtgcaccgcagcaagagggtgaaacctctgtgagcgaagaccatgatcaggacggtagtgactctgaggtagctgacggtgtacttaaccgtcgccgttcggttgctttgagggagttgccgccgcctgcagatgagcaagaagatagagacgatgatgcagttgcagagagtgaagaagttgttgcttcaggtgaaccagtgcagaggagcggaagctcagtgggagacaggatctcgtcagccagtagtgatgaagaggaggacgacgatgacgatagcagtgctggggcatcgtttcgccgatcgacatgcattcgcagacccaatgtccgtctgtttgactatgaaattgaagtgccagaaagtctggtgatccagcgatgaatgcagtgatggaccccacctctgtggatgaggcgttgggggctcctgactctgagaagtgggttgaagcactgaataaggagttcggtgacctgctacgcaacaacacatgggagctggtggagaaacccgtaggcgcaaaggtgttgacgagcaagtgggttttcgtccgcaagcggaacgcacaaggacaagttgagcgacaccgagcccgtatcaccataaagggctgccagcagaagtacggactggactctacgcccctgtcgtatgtatggaaggggtacgtttggttctgctgctcgcacttcagtgactacggcctggactgtcgtcacgtggactttgtgacggccttcctgaacggaccaattgatgttgagatatacatgaagcagcctgagttatttgatgatggatctggacgtgtctgtcgtctgcttcggagcctgtacggcctcaagcagaccccgaggatatggtacaagactctcgacaagtatttaaggcaatgtgggttccagcgatcgaagatggatggaggaatttactttcgttgggtgaatgatagtcctatcttcttgactctgtatgttgacgacattgtgattgccgcgactacggagaacatcaagcttgtgttgacggagcttgcgaagaagttcgaagtcaaagattgggtgatgtgagccactttctttcgatggagatcaaatacgtacccggccagtttctgtcgatctcgcagcgtggatatatcgggcggattcttgagcgattcaagatggcgaactgcaaggccacgcccacaccacgggcgaaaggcgactttccgctgccaggagattccgatagagagactgtgtgcattaacatggatcctgatgtggactatcagtgcattgctggttctttgcagtatctggtgagctgctctcgcccagatattgcaaatgcggtacggactttgggaaagttcctgacctgctacacgaagaagcacttcgtgctggccaagcgtgtgcttcggtacctacaaggtactcgtgagtacggattggtgtggaatgtgactgtgcctcggggattgcagctggctgcctacgctgacgcagacctcggaaacgagaaagatgacagtcgttccattactgggtatgtgttgcaactcaacggttgcacatttgcctacaagagcaagaagcagccgatcatcacggacgacacgtgcagtgcggagttcgtggctgcgagcgagtgctcgaacatgataatgtggcctcataatttgtttgaggagctgaagctccggcgggcaaagcaaactatcttgtttgaggataaccaagctgcgattaaggtgatcagtgaaattggcagcaactacaaggtgcgcagtgtggatctcaagttccacaagattcgggacttcgttgagcgcaatgtattccgagtcacgtactgcccaagcgaggacaacattgctgacatcttcaccaagccgctaggcccacagcagttctgcaaactgcggcaaagcctgaatgtgttgtcagcacccgacaacgcgtagttgcgcgctccgagcaacaagctgacttcaagagaggtcaagcaacacgaagtgggagtgtgaactattgtgtggtggcagttgggttctgtcgtgtccctgttccccgtcgcagttgaagcagtgctgcagctcacctaagtttactattgtatactctagcctagcgtaatggaggctgcgctggggcgcagttctctcgcaatcccaaatacgctgagtacattttagaactgagcagtcaaagttcaaacccttactgcacagtaatgttacgctatagttatttccctgcctaatgcactcattcaagtgaaacaaatgtagtagaaaatgtccccagatggaattgtacaacgaaaagcgccacaagccgcgacgatggactcgacggacgccgacgcctccatctccaaggccaagctgcacgaggtaggcgtctcacgccctcgtgatcccacaaccacaccctgctgtcaacgcgcttgatggccactaacgccgcgccgcgccgcgctcgtgctgcagacgttcgacgtgctgccgaacctcatcgacgtgctcaaggacgtgctgtcggccaactcgacccaggagaccatgcgcatcggagacgtctcggcctcggtaaggaaggctccactatagtgtggcttttcagcctctcaaggccgcgtgctgacgtgagttttcggcgtcttggccggtcgatcgcaggccgtgtcggtgaagcagaagtacacggaggcgctggagctgctgcgctcgctgccgggcaccgacacgtcgctggaggagcaggaaaccgccatcgccaacgccaaggccgagctcaagcgcatttcgtacgtttcgaccgctatcagtgttgctgcgtggcgctgtgtcaaggcaagtgctcgatgagtgacaccttccctgtgtattttgtgcttgtgttgaccattacagggacgtcgtggagctctacagcaacacgctgtaccgcgggacggacgagccgcgcgccgagatcaacgacgcattctctcgcaagagcctcctgaagtgagagctccacctctcaaggtagaccttccccatcggaggcacagaatcgatcttcaactgcagaagcgttggctggttgtatttatcgaacgcttttgcttactcgagcttagtagaaaccgaagaaactcaggaacttcttggagaactcgacgcccaggaagcacgcggcgttggcggggaacgcgcgagccatggcggggcccacgccgttaaaaagagcgccagggccctcctgcttcatgagcaactggaagcagtgcacgatgccgcggtacgtgccctccggcgcggtctggatgcgcgacttgatgacatcgggcgggatggcgatgacccagttgatgatacccgcaaagccaccagcgacgaacactcgaaaggcgttcaggtccgatgggtccttgcccttgggcgtcaggccgcgcttgattgcctcgaaaccgccgaagtatccaacagagctaaatagcacaatggcaacagcacgtataacgcagtagactgttagtcatcgacaatctgcaacttgcagcaacgacaggtaactgcggagccacttacccagggacgtcacgcagcagagtggcctcccagccgcggaagatgctcgacaggccgcccgtgcggtacagcttcttggcgcaatcaaccatgccgtcgtaaagcttgggctcgccgcgctccacagcctgcgcctggatctgaagcaagcacttgatgcgctcgccaggcgccatgaccacagtggccgggatggccgagaatccaccggcgaacatgatctgccccatggacagcggagccgtgggcgactggcccgacgccttgatctgcaggtggtttgcacaacattgcaattgatcagaactcagtagcaaggatgctagacacaatgagatgatagtgcacccaccgcaatgagcttgcccatgtcgtagccccagaagcacgtggcgaagatgggggtgacgcccaccagcggggccgacataccgcggtacagaccacggacctgtcaataggataaaagaaggatcacacagcaaattagtatcttcctgctcagctttggcagcagaacgctggagacagacagtgtcgtaccccatccttggcgaccatcttgcgggcgcagtcgacggcgttcgtgtacatgggcggctggccgggcagcggcttgggctgcgtctgcatgttgaccttgatgaggtcgagcgggtggcccgttgccacgaggcacatgcctgtcatgcacacgtcagtcgcgcgtcagtgtccgcggcctcagtcgttcactactgaagcgatgtaatagacgcgagacgtaccgccgaagccgccggtcacgaaggacaccacgcccgacgtcgctgcagacagagagaggagtatgcgtcagtgcatctccagcctattgacagtgttgctggcggagcctgttggtcgtacgtttgttggtcgcttcctcgctcatattggctggggtaaggaggtgtgactaaaggtagaggtggagggctgtagcgatgcgggactcttggcgcggatcgaggagtgcggctgacgcttcacgttcggaagtgcgagggagcctgccgtttacgtgtgcaagcgcgccgaaagctgaagcggcttcaagttggtcgctcacttgggctcagtatgggcgctcgcgctgaaatgcaagatcgcggcgcgatctggtctcgcaggtccgcacttggcgtttgtaagcgtgttaaatgatgcgccttcgcaggatattgcgttccaattggctattgcgtttcacgggctcaactcgactagcgccaccggcccgccaccaacgtcacacatatgctaccgatcgcataagaaggaagccgctgaggtgacgcagggcgatagcgctccgtccaatactatgcattggacgagtgcaattgcagcgggtggcgcaagtccaatgttgccaatcggccagcaagtccgatgttgccaatgggccggcatcgatcgaggtcgatcgccgtcagtcttcgatttgccgccacaagaatcaagcggccgtggtacttccgagttcttcgttgtgagcgccgacctcgaagtgcattcgcgggcaggaaggcgtttgccgccaaagttgccccaaattcaactcgctgtcggtacaaacggccaccgcggcagcttcacttgtgtgaacggtaaccacccgcggcgctgcgtctcaggccgctgctgaccagccagcctggcggcaggcaggcaggtcagaccggggtgcatgagttgaacccgcggcgcaccatgcatgtgcgcactagccggcggcaacttgactggtcctgacgcaggactggtctgcgcggctcggacagagacgccgagtgcaatcttgcagagccaccagctcgtcctcggccggtcgccgccgtccgattcgccgaaatgagtcgcgcgtggcgctccgcattggttgtaaaggcgacgttgaatgaccgctttcgaccaatggagagtctgtgggctggcgtttcgattccgagtgcgttctctgctccgctctcacttctcttctgccgatggctcgatcattgctgaatttgccggccagggcgcaagtgctctcctggcagcctttcagctgagagcagaagaaaagccttcgaggaagagccacgtgagcgcggtccacccaccgaagccacctacactgagctcgaccccactggcgtgttgcacccaccactcttgtccactcgcaacttcttttgcgtcttcttgcagcaacagcagcagtagcagcggagtcccgttgccctgtttgtacccgtgcaatctcaccaagcagcgccgggctcacgtaactcaagccgcatacacagtctcctgtccccacgtaatggaagtgcaggtggacaccatgccgatcaaccagacctccaagaagcgcaagagcctcttcgctgccgcgtcgccgatcgtgccggcctgtggctccatgcgctcgccgctgaccacgccgctggcgactgccccagcatcgccttctgccgcgtcaacctcatccgccgacggcgtcaacctgtcggcggcgctgacggcgctgaaggtgtcgctcaagcgcgacctcgagagtttcgcgccgcccacgccggctgtctcgccagtccacgggcgcagcgcgaacaagcgcgcgcgcttcgacttcggatcgatcgaggaggaaacggaagcggacgcagaggagcagcagcgagtcaaggcacccgccgcacccgtgaccacgaacgccctgctggcggtcagcaaccgcatcaagttcgagctagagaagcgccgccgccgcgatcgtgaacgggcgcagaagccgcgcagaaggaaacagctgagctacttcgccatcgtcggggcctttcagcgcgcagcgcacgagcgcgaggtcgctgtccaactcgagtgcgtcgtagaggcgtctacggactaacaacacatcgccgagcaccggcagctggtcgtcgagacgcaccgagagtcgctgtttcatccgtgcccgccaccgcccgtggcctcgagcattttgagctatctattcgagccacgtcgtcttgttcaaataactatcgtaccaatacagagaaacataccatacgcgtgcgtccgctctgctcttgatttgcttcccatgcctaccacgctgagaagtccttcccgttgctcgcagcgaggcctcaacgtcgcagtcacatgtcgcggcattgagcagacatctccacctggccgtacattattaatactctcgctagcgtggcgcctcaagcaccaccaagccacacagtgcgcccgccaggcgatggcgtcttctctcgacactacacggcgcgccacactgcgtgaggaaacgccagcagcattgatagagcctttcacagtgttgttcgaaggcaaattttggtggaaaacggcaagcactcggaccacctgcgcttcgggggacattcgggggacatcccaccaaccaaaaagcgcgtgttcaagcgtggccgctggccagccaaaaggccctccagcagtatcagttgtatcatccatcaccacagcagcagcagcagaagcagcaacatgagcgccgtcgtcgccgaagtcgagaagcgcacgcagacgtacctgccccagatcgagagcggccgtgcgctcaccgccacgtcgctggccacgctgagccaggagctgccggccttccgccagatcacgggcaaggtgcgcgacgtgtacgtgttcgaggaccgcgtgctgctcgtgtcgacggaccggcagtcggccttcgaccgcgcgctggcctccgtgcccttcaagagccgcgtgctgacgctcacgagcgtctggtggttcaaccagaccaagcacatcgtggccaaccacctgctgggcgtgccacacccgtccgccatgctgtgccgcaagtgcacggtcttccccgtcgagttcgtcgtgcgcggctacatcacgggctccaccagcaccagcatgtggaccaactacaagaacggcagccgcgacttctgcggccacaagctgccggacggcttcaagcagcaccagaagctgcccgagaacctcgtgacccccacgaccaaggacgacgagcacgacgagctcatctccggtctggaggtggtgagcagcggccgcatgacccaggagcagtgggacttctgcgagaagaagacgctcgagctgttcgcgttcggccaggagcaggccgccaagcgcggcttgatcctcgtggacaccaagtacgagttcggcgtcgacgaggccacgggcgagatcctgctcatcgacgagatccacacgcccgactcgagccgctattggctggccgactcgtacgagcagcgcttggccgagggcaagtcgcccgagaacatcgacaaggagttcctgcgtctgtggttcaaggagcactgcgacccgtacaacgacgccgtcctgcccgaggcccccaaggagctcgtgagcgagctctcgcgccgctacatcctgctctacgagctcatcaccggctcgacgttcgagttccccgcccctgacagcaagcccgaggacgagttggtcgagggcgtgtgcaaggcgctgctttcgaactagatgaccgagtagaggaagcggtctctgtgtagatcaatcaatacatgtgcgtatggacttaagatgttgtcttgatgtttgcagaagcaaagacttgttgtttcagccttcagaccacaggtgctctggcaacgtcagtgccttcaaagcacgccatttgacttctgtagcatgaataaagcgtcgttgcacgcatcaagtgtggctcaataagcgcacgaaaacaagagccatgcaggtcttcaacctttgtgcactcgtgaagggtccagcaaaaacctggtaaggaagacgcaacacaacgaggtggtcgacgactgaactgcgaatttggtgggacaaaagatgcgggcatcttcgggaagaatgttattccttcatgtgacctgggcggtcggtcagtcgactacaagagacggagaagtttactccttcttggcggcgggggcagcggccttcttggccttgcgctcgcgggccgacttggccttctccttgcgggcctccgactgctccttgagcgtcttttcgcgctggcgctcggccttcatcttgtggatggtctccatgagcacacgcttgttcttgaactggttacccttgctgcgcatgtacagctcgtggtagatgtgcttgtcgatcttcttggcctcacggtacttgcggaggagacgacggagcacacggatgcggcgcatccagatcaccttgaagggcaggcgagcgttggccgtaccgcgacgcttaccgatgcccgtgtggcggcccttgcgcttggcctcgtttcgcttggtgaagcgggcgcgcgagtggatcacctgcggcttcttgatgacaaagccatccttcacgagcttgcgaatgttctgacgcgagttggccagggcaatctcgttcgactcgttagggtcgagccagatcttgcgcttgccgcacttgagcacggacgcggccagactgtagaggggggagcagcatacacacacgcgtcagcatcctgctttcgttccctgtagacctgagggctggaccctgtggctggaccctgtattgtattagagcttcacacgcaccgcttctgaagcttcagcgacaccattattctttcttccgatttgtcccaaagaataaatggccgtcgaggttgccgagcggcactcgcccagcagctccaacgccatacaaacggcaagacagctgctatgcggtatacaattaccaagataaacctggggctcacggggagcccgacccgaaatgactggccgaggcgctgacaatcggacgaaccggtcccggaccggtccccgaaccgcgcggaccgtggcgtacaccacaccaaaaaaggcgccttcaaccatggtggtgcatgtaacttagcaacagcttgcaccttgaagacgtaagtaagggctgtgctggccggccacatcgccaccgcggcaggcgaggcgaaccaaggccagcaaaggtgccaagcttcggggccgcaccgatgtcgttacgcagctggcgtgactcaaagaagcaacacaaaacaacagcatgacagcaaagtggtttggattcggagttcagttaacgaaagcaagacgctactcaactcgcccgatcgagacggctgcgcggacgagcgcatacgaagcaggaggtggcggtggacgggttgcatcggctggagcggctagcagcttgaggtcttggagagtgcacgggatcactagcgcttcacgacgtcgtgctccttggtcaacggcttggccacttgcttaccatccccatccccacggacggcgccatccccagccgccgccccagccccactctttcgggtcgctgccttccttcggcatgccggcaggcggctgcgcgttggcttcaggagcgggcggagcgggggggggcgtcggccaaagcgcggagagcaagcgcctcaacggcaaagacgctcgttatggcgagcgccgaagcgacgacgagagcggtgaccttcatcgtcttggtgttccggttcttggaagacttggatcggctttcgggtctcgagttcgctctcaggagcaaattgcgttgtgtcggaccggggccgacggtgtgttggttgtcaactgtatggtgtagtcattcaaggagagtacctgggaagctgcgtgtccactgccaccaagtcaagctcgttggttaattgattttgagcttcaagatcaagattaacggcttggggagaacttgacgaaacttggatggactcaatggcaacttttgctgcatgtgctcgccccccacccccacttcgggtgaacagcatattttgctccgtgtaattgtacgtccggtgcgtggttttcggcgcccaagttcaagataccgcttcaacatgggccagccaagtggcaagatacttgcagcctggtgagacgagtccttgcgttggtaagctacgcttacgagctgagtgttatcaattttgctactgtgttgcgatgtgaatatcagttgctgccgtcatggaggccaaggccaactgatgcaggtgagcacggagatcaaatgacggcagtgttgatcagcagggaacagttgcaactggtttcgagtgtgatagcgaaagctgggggtggggtggcgtattgcgctgggtaacacggatcaagatgtattgaaatgcgtctcatcagcaaaagaagagtcccccgaggggaacgccaagtctgcagctcttgattaaaacctcagttgcgaaaagcgtccagtagtgaagaggataggcccatccggggacgccgccgcagcggaagccgaagcggtagggtccgtagccgccccagcctccccagttgccccatccgccgccgaggccccacccgtagccggctccccagccgaagtgctccttcttgtcgtcgttggctgcgtcgtgcgcggtctgcagcgcgttgatggtttcttgggcaccggcaggctgctcgatgctctcgacggagcccgtgaactcgacgccgctaggtgcagaggcgctctgggccacctcgagcgccttggtcggcggcatgacggccggcatcgtgtcggcgccggcgacaacgttggccatggcgacgatggcggtgattgcgaaggcgacgaacttcatgttgtgctggagaggtgtggtgtacggcttggtctgttggtgtgttggttgattggtgtcgctggtgccgtgttggtcgcaagtttagttgtgtcgagcgggatcgtgctgtgtcgtggtcgcggtctccgttccgagcacgggtctgcagaatgttgggtcggagtgcatctttcgtgggcgatggttgatttgatttgcttgcttgctggtggatggtgacattgacaacaccgcggacaattcggtcgagtgtcctggctggtgtctgcctgtgattgatgcggtagtgatctagcgtgctgaatgctcgagtctttggacggggaccgaccggtgtgtcgttgaaagcgcgcgcatgcgtctgcattatgcagcgaccccagtcgaataatttgggttcaacaacactgggaagggttttgaaaatgcttttcttctctcccaatccagcttcatcagatgaaatacgtcgacaggagcctaaactgcgtttaactagtgctattcttgttatacagtttcgcgtagggctctatcgtcaacaagttctttaacactatagggtacgatcagaagtaaagataacaatgggaatgagattggttgcagcacggacctttgagctttttttttagaaaatccatcgaaattgaggattgagcttcgctctaacttcccctcaagactggttatggtgcgtttcctgacagcgcattcagtttagcggcatacttcttgagcatttcagtgccgcttggcataaaggcaaacctgtctttaaggactaccagcggttccttttcagccacccacttgtcgacgagagcattctgcaacttcgtcgccagcttccccgtacttgggtccttcttcgccgtgttaagtatctccagcagtctgatttcgaagtagttcgtccggaggccatcaatcatcgtcgttttttctacattcagatacttggcccagatttcaaaatttggatcgctgtgccagcatgctccagattcagatcgcggaacacctgctgaagaagttccttgctgtctagccagtacttggacctttccttctgtaactggttcgcaatgttcacggcgcttggcttcttcagcgccatctcgatcattgcgcgttatcaggtgatgtccgactgttaagccaaaactggttcaattgatcttccaacttggtggcgatgtctttgactccttgcacgctcatcgccgcctcagcacttctgaacagagcaacgtcattattgtactacttgatgagcatcggcaccgttgacgctggcttgtcgggatactttgcgttaaagtcgtccacatatttgacccaagcgacgaattcggaattggtgaggatgttttccttcaccttgtcgaggctcatcacacgaaagacgtcgtcgggagtttttgctgtatccagccagtgctgcatttgctcattctccaatctcttggcgagctcgttctttttggtgaaagtcttggcagatttaatcgtcttgtagagcgcagcgtcgccgcagtaagcagtcagggtcgagatcgcggacattttcttcgttgggctcttggcgttcgcatcgtcgacgtacttcggtatttccatcaagcgaagtgacacgatgtggaagaagatttttcgccgtactcgtgttggactgccggaaggaccgaatcgtcaactgactgtgactggtcgcagtggactgatatccagtgacgtggagtgttgcatgtggatagtggatgcgcatggtggatttggcgggcccggtgcttgcagtaagcatgggctcacaggatcggagatgtgcccaccggatgagcgctcatattcggtgtggagtaacacatcctgtccgtccgccgacttccctgaccgcaggatgagcctaaggcgcgcaaatgcagccagtgaacgtatcctggctgctgcctgcattggctccgtcaagacatcggaccaacccccaagttcaccgtgcccaccatgctcccatgcgcccaaacctcgctggacgaagaacactgtttgccggacgggattgtggtgcacccggtagcgacgcaccggatgccaaggtgccgtaccgaatgaggccggaccggatggtcaactcggtctgacccctggtgcccgtactggatcgtgaccgcaccaacaacaagtccaatactgctgtgcgtgaatgcactgtggcagcaatccaggaccggatcgaccaagaacgtcaagcgacacaggatggctcacgtgattagacgcagaggtccagtgcggatttgatgagacgccgtacccacgtacctctgtcgccagatgatgagtgttgccgaaggaacgttgacgtcgacaagttgcccgataaccaagccaagtcaagcatacccaagctcagtgcaagaagatcgaagccccgtgcacaaggtcgaagcatatccaagacaagtcaagtatagtgaaacctttattagaagtcagtgaagtgaagcagatagctagccaaacgtaagatcaaacagaaaccaatttgccgagaacacgcggacgtcttccttcgggctgggaattccccctgacattgacgtcttcaagagcttatacgtgggatccgccttcgtgcgatcttaaaacggaggacgtttcaaggcctcactggtgttgcgagcactggtgtagtggggactcaaaggtaccaaggcaaagtcggcagggactggggtgtcgcgccctggagtgatctgtgagagctttatttccaatttgcgtgctctatccgggcatccatttcatattccatcctgtgtgtcttaggcggtagaggtagtcacccccgagactgaattgatcgactactgtgtgataggattgacttatattttgtattgttccctcactctgtgagggtggtgcgcgtgagtgagtgtgcatccagggttgaccagtgccttgggtgacggctcgtaagttgactggcgtatagaccccccacccaagggtcttcaagaataagtggtggctgtatattttgtgacgtttagctcggcattgtatttctgtgtgttggttatactgaattgtggatctgactgtggtcccttcgattcggtctgaccttctgttcattcggtgtagtttgtttcaggaacacacccagcagactcgattctgtatttacaacaactcactcggtgaagtccggtccgccaaaggtaaacgataccttaggggttgacacaaggacacacgccaagtccaagcgaccctcccagcccccgattcacatcctgtgctccgaggactatcggattgcagcggatatctctggtactccgaaccgattcggtccggcatagtgcgctatacacctggacgatcaaggcgttcacccgcctcgcctcagaagcgaggtggaaataaagttttcctgcacaagaggagaaagccacgttgccacaactggagcccagtcatggttcgcgctcagctgcatcaagttcagcgacccgctcattctggagagccatatggctatgattaggatagactgtccgataagcggttttcacccgggggtccgaggaaccttcggttctgagggcccagtggtttttgctccgccacatcgcacagagtagtaatcgatacgtagtcgttcttgatcgtctcggccggccagtcgcgctttcacctctcggacacaagcggcattccgacgaccaagacaccagcgctgcggctcgaccaatcgcccgcgcttcgattcgacacccaccacaccactccctaggctgcctcatctcggctcattacatgaccctcaccgaggctcgcctcattaatcaagaacgaccacctttgccccaacgtgctttcgtatcgcaggaaggaaatgagccactccgtgaattggggacggtatagcagccacccccccgcctttttcagacgcatgcgtgcgaaaactgtttccgccgatttcccttcgtcgagccacttttgaagcttgtctggggttactttcgaagaggtgagtaaggttccccgcccagccctgctctatcctcgccgtccgtgtcatcgtccacagcgctagctcttaagtacctcgtcgcagaggcatcaccggtgtctctcacagatacactccacgacaaaaatatatggacacctacgttgttgtccatatctcagcaactactgggaatttgcagacgctatttagatatgtgctaccaacccgactaacgaatcgataggacgtggcgcgaaaccgcgaatcgcagcgcatctataggctcacatagagataagtgaatttggcaccgcgacaaatgttatggacagcaaattgtattgaattttgtatggggggggtgagtgatggtcaggaagagctcactggctctcattaagcaattgtatgggaagggggggcaagcttcacggagcaggagcgcgggaggatcaagggcctctcggaggcgggccttggggtgcgcgatattgcacggcgggtgcaacgctcgccccaaggggtctcaacgtgctgaacgagaagagcgacgcgaagccgaagaaacaagggcgcccgaaggcgttgacgaagcggcaaacgcgccaggtggtcagggcggcagctacaggggactacacagcgtcggagctgaaggcaacgtacagcctgtcgtgcagtctacggactgtgcagcgtctgctggctcgtgtggacttcctcacctttgctaaaatggacaggacgttgcgattaacccctgagcacatggcagctcgccttgagtttgccgagcgcatgctgctggctgctcagaaggaaaaagtttgggagctaattactttttctgatgaatttttttttaacctagacggaccggacgggtacaagcattattggagggacctgcgtcgacctccgcgccgttacctgagccgtcaggacggcggcggctcgctcatggtttggggtgcaatcggatacgagggcaagtcggagcttgtagtgctggaaggtcgccaggcgtcgcaccactatatctggacggtgtcggagcacatgttgccgctcgcccaccggaactacggcaccgacttcgtcttcatgcaagacaatgcctccatccacgcttcctacgagactacggacttcttcaaagagattggcgtcacggtgctggcatggcccgcacgctctcctgatttgaacccaatcgagaacgtgtgggccttgctagcggacaaggtgtacagccccgggaagcagtaccattcggtacccgagctcacagccgccgtcatgaaagcttgggactccgtcactatgcaggaaataacaacgcttctagactcgatggataagcggtgcttcgaggtagccaagaagcttggcgacaaaacgcattactaggtccaccctgaccatcactcacccccatacaaaatccaatataatttgctatccataacatttgaaacaattcgggtacccatcgggaccccggttcccccaaaactaccggtgcacatgtatgagcaaatgcattgaagtgttggtctatgacctacatagaacgcagctaaagctcagtaggggaacggaaggttaatttaccttcgtcctcgtcctgtgtctctccacgaaaatccagtcacttgcctggtgcagcggtacagtgcttcccggtctcatcgctatcctcctgctcatgaaagataaacgtggacatggtaaggtatgatatttgggtatattcagtaccggtggcatatttcgagagtagttgttcatcgacagcacttaggtatgagggtttaacttgccccgagggaaccaatttggaggccaaaaattaaataaataattcgcgatttggtcggtatcatttgcgggaacccgggttcccgccaattgtttcatttgtcgcggtgctaaattcacttatctctatatgagcctatagatgcgctgcgattcgcggtttcgcgccacgtcctatcgattcgttagtctgattggtagcacatatctaaatagcgtctgcagattcccagtagttactgagatatgaacaccaacgtaggtgtccatatatttttgtcgtggagtgtagatagcgtctcccacgggcactgaggggcttccagccaacccgtctactacggtggcaaagagagacaagaccatcagcaagtggtggcgctttgtttgtcttcgagagttagagtgtctgattgttcgtagatagcgagacgaaggggaaatgcaccagaattcagtatggccagtatctgcgtgtaccagcgagaagcaggttgatctcgtgcaaattcacctcgaattacttactcgatgatgggatgcgtctcatgctcatgtcgtcgttacgtacggcatgcgcattaacccttactagaatttattttaaatcaattatgtactttcaccaaaactttcttctcaacgtttaatttggttgaaaatatctggccgcgcaaatcgacaaggttgctgtgctttggctgggagaccatttttctccttagtgttgtgtatcatggaagtgcaatttctgcatcggttaatttcagacagatagtttagaccaaggatgctcggaatctgaacttcagatgcggccctctgtgatgccgacgtaacacaacctaatactcgctaagtaaagtgacgcgtctacctctaatttagatagaagccattgcatattctttagtgaccgatacagtagttggcgaactgcctgtggcactgcgcattgggtgttaagtcacaactgcagcttttgagatgcctgtcatggccgactgtagcagtcggaggcaggcagatgctgcggctgcgaagcaggcgcaggagatgcctgtggataacaggtttgtagcactgtagtgtggtggctcgtccctcctctgaggaacacgagcaggatctgccgaacagcgtccaggtcgtgatcgacttgacggagtagctggtgtggcacaccgagcagcagttggtgacgaagagtgtggggacggcggctagtggtgacggaagcgagccagtgggctaccgttacgtgcgacaggaggtagcagttgaagttgacggctgcagaagatcgcaaggcgaggtgacctgcgaacaggacagagaacgagtatgcagaggggagaggcgacgctggagagcgagtgtgaggccaggaggccacgaggaaggagatgagggcccgagagggagaggtccaagcaggctagaaggcgccgagtggataggatagggtagatcgacgggggttagaagtaagtggggacaacgagctgcggtgtggcagctcgaccctcagttgcgatttgttgctggatagtaacgagtcaagacttgtaatacactcagttaccccgaaatgcgggttcctgtgacctagtaccagggaagtgtcttgcgaccagggaagtgtcggctagacacgggagtaagtggcataaggtaagcgatagtggcgggcagtgcacagatgagggcgatgtattgagtagggtggcgggaccacggagagaagccgtggaggcgcgaggtgcactcctggcagcaccttggccgtgaaggacagcgctttcgaatgcttgggcgtgcctgagtgccgtgacggagatgctgttcgacctatttgcatgtccggtgggggtcgcctgtggcttgccggagcccaggtcgattgtgtttcccctcccagccgtccctatccccgacacgcctggtgaaggggccagtgcctgtctggttgatcatcgtactgcctcgtacctgctggcagtcggcgctatactggcctacctaggcgtggacgcgacaacaacaacggtgtaagttcgtaagggtggacgcgtgcaatactatggacgaccgggctagacgggacctggttacctgtggtagacgcggagcactacgggtggtcgggctggacgggatctatctacctgttgtaaggggggaccgggatgggggcagacccgggaacttcctacatggtggtcataaacagaggctctctgggcttgtcaaaaggagttggcatgggagctgagctttccgtgggcaaaccccgcagcgtggaagagaattggaagggaatgaggattagatgagaagagcgtgaggaatggggaactgactgagatgattgtgattaattgtgttagagctaagagaatggctacgaacgtggtggcacgtgacgaacgagcgcagcgacgcgctgcatctgcggagcgagcggctgcggaggcagcgagaagagcgaaggagacgacggaggtgactgtggacaccggcgacagcagcacgctgacactggaatcctcggtgatcaccagcacgtcgggcgacacgccgctgggatcggcgagtgacggacgcggtggtgctggaagtggacacccgggtggagacggacaagctggaggtggccgtggtcggaccggacgagacgaaggagctggcagtggtcgtgagccggccggtggcaatgacggcgaacggtccaccagcggcagcagtggcgacgtggctagaagcaacttgactggaggcgacacgacgccgacagcgggagacggaggtcgatgtggcggcggacacggcgatgacggacacgggggtgacggtggtcacggtgagcgggttggtcaacgtgaggcggccaccagcttctccggcgactatgtcgacttgacaggaacaggaggtggcggcggacacggtggcgctggtcctggacgcgcatcgaccccaccaccgacacttggagcagcgagaatgagagcggtggcggcacccatcgtcgtccgtgagaaggcgaaagcactgaagctgacgaaattcaagggggttgacgacacgatgcccgtgagcatgtggctcaagacggtgcgtcaggaggtgcgtcggcaggcggtcaccatgggcgtcgagtggaacgagaatcagctgtaccaagaagtcgcgtcgcacttggagggcgaggcgaagcgctggttcgcgaccgtgatggagtcggtgcagccggacagcagccgggcaccttaccaacttggacaagtgaggtcgtgggacgagatcgatggtcgatatgtttggtccgtccacatctcaaatggggattccgtcagcatgggtctccaggagctagcggagtgcgtagctgaaaactttcagctcggtgttgatatcatgggcgacgtgcaaattgcgtagtcggcgcatgcataggaatggcggggcttcctttcggctttagtgttgcacttgcccggtagttgagctccccccccccccccccgatttttccttaactaacgaagccttcatttttcactctggtctccagctggaagagggggggggggtcgtcactaatcggagcaaccttcggttaggatcaccgtgtccatggtaaaggtgatgctgtcgggccgggggggcaacaaaagcgaccgtcatgtacgtggcgagcgcgctgatgcgtgaagagctcggagccgttgatattgttcttcagcagcctgaccgtggttagcataccgattaccgaaattgatacgatcgcgagtgtagtgcttagctgccagtggtgagacaggttcatgatcatgactccacaatcagcatggagagcttagtgcccaggctgcagaccaacatatacgcagtaagcacacacacacacagaacatagtaagcaccaggcatcaccaacacacgcacaccccatacaggctgcgaacctgtgttggcgctcgcctccacccgttggtagcgctgctcaattaccggaaagctgtttgtacacacataaaaccagtgccagcacgatcaatacttcaccaccccatgctgcgcagtgtgcagtgcgcagccacgaaccaacgttcagacgctcagcgagttctctgcttggctatcgaccatgcacgctgacagtccacaaataagtaagcacccgttgcaccaccggatgcaccgtgcatgccacgaacctgtgccaccgctcgtcgcctccatcggtgctaaccatgcaccagaccaggtatccgcaaataattacaactacgattagaactattgtcgtcttcacgtattttgcgccctctattcgtcccataaatcgtcttgactaaacaaagaagtcgttgtgcaaaacctatgcatttcgccttgccgtccactggtcagcaccacagacacctacctgcccacggacgacaatgatggccgaactacccacgctacccgcgctctgagacgctgtcgtgacgatcaaggtcggcgtgccactgacagactgcaggattgtacataaagcttctatcggtgcgtgagggctacactgtcctgaaggagaggctgaagcgtttgacaccgctgtgatatcgcctgccgacgacgctatctacgtcaaatcgacggtaaatgcgcgccaacacgagtacaagcacttatcggaggacgaacctggcgtctatgcccccggcgtctacggtcctggtgtctacggtcccggtgtgggcgtgggcggctatggcgcttggcttaggcgccaaagcaaacggactccaatattcaagcatgtcaatagggtaaaaacgcctaatccgatccactgctactgcaagtcatgttagggccacaataaaaaggtagcacttattgtaatagaccgcaatctcggcaggagcagcctcccttgcatgcttactagaattttccgagtaagcagaggtcaaagccacggaagcgtttcgtagtgtaggaagtcgacctttaagcgcactgcacagatcgtagatgtacaaacacgggtgggactcagcatattgcccaacaaaattgacacacggccatctagctgttcgcttctttctccaactccttcagcgctttctttactttgaaaccaaccatgccatctctgcaccgagcacgccgacacgcctagaacactgtctgcgttgacagtttctacgtcataggcatgaacaagggtaacaggccaacgaaggtcgctcgattttgtgattgcacgccagcacagagatgatttagtagcttgaaatactgtaacgaatggcgggagctgcagccgccattcgttaaaagagctcgacaaatcgcttgctatatctctactcgtctttcaactcgcgaaacctgctcaaactgtttttcgctccctgattattcgtgcaattgagagtggcgaatgaggcttgtagtcgatgtgagcagaaggaaggaaatccgaaagtgagtttatttgagttagttgtctttgtcctgcttgtttcttcctacccctgtagctctcctagcgcctccctcgtttgacttcatttaactatatgcatgtgcagcggtcacacttgagtgggacgggcacgggccgtcggccaatcacagtgggcacactcgattggaagggacacggtccatactcaaacacagttgggacggtcacacctgattgggacgggcacggtctgtctcgtcaatgcatgtgaatatccatgccaatcacagctgttgatccgacttcaattgtctcgcccaatcatatccacgcgaccccagatgatccatcaatcaggtcgcagcattcgctccacttcaactgcagccccctagaggcacgcgccacgcacgcaaaggtcatgaggctcgtagcagggacccagtcgagtagacagcgaagtgcaaccacaacacgtgctgggctctggtataaaccgtcacgaaatggctagtccacaccaaaatgcgtgaaatccacaataaccaaaagagcagatagtccgcattctctatatagcccaatcgacgcgaagtttatcgccgtccccatgcggtgcaccccagctgcctgcacacgaatgaacgccacgattagtacctgaaacacggatgagcatgcgacgcagccacgaacctgtgacgaagctccaccgctcgccgccgccactgcttggccccacgccaccatgcgagctgcacacacgtaaaatagtacccatagttagcagccaaaagagcagatagcaagcttgaaggccgatcccatgcacgtcactacaacctgccagctctgctccgcattcgagccccggcgcggcaaattcgcgaatggcgagtagtgggttgaagtcgcggctagcgctgtcctgtttaatgcgaaacacgacagctaatccttctttacgacctttcggtacactagcattgctacatggcttggtagatagactgacattcactatgctagtgctgacatccctacagactgatacataggctaataaatagatttggcttcaatatactgtaacttcgaggacggtgtcttgtttgggccaaaccaagacagctcacccattcacttcttcgctactgactgagtgattaactgtttgtattgtatacttcagttcactattgctatgcttctcctagtactgcagccaacagggcagtggcagcgagcccaagccaggaaagtctagccagcgcggcccagccaacggcgctccccaacagcgttatggctcagccctcgagacagcttgtgggcgtgtagctagctactgtagcatcaaacacgatacgcatatactacaacatcagtagataaaatgtgtctgcattcctctctatccataactactgcccatcttttcaatgcagccgctactacctagccgtgtgttgctgatggtagcgcgtcccagcctgtcatatatttccctatattattcggccggtattcggcggtatcggccagcgctggtagtaagtagttgcgaagtaacactaaaatgaaataataaatggactcgggggtacaattttttagcgtgtataatacagggtttagtatgggggaagaaataaaataaagactgggggggcaattgtacccctggggtacaattccaaagcacgtgtactagtcagtcctaacgaactgttaattgtgctttgcaaacgttctgtcgttttgacttggagctctcctcgatttatcattataataagtcgaggtcgatgtaataaaacgaggtcaaagaaagggacaggtcatttaggccggctaataactcgagctacgacaatccaaattagggcttgaggtcgatctccggtggatctggacagaacgaggtcgatctgccaaatcgattccttttgcgtttcaaaggcgcaaatcgaggtcgatctacgtaaatcgaggtcatccatgctaccgtctctgttttgtgccctgatttgtgggtcagccctcctcgatctaggccattaaacagggcgacattttatctgcaaagccacaataaaacgagtaatacaatcctatattacttaactgacggcagagtattattagaagtatgagtgatcgacaagagtaataactagaattatagtagtactttggatgaagctagtaaaatggagaccacagtgtcctcgccgtagatccgatggtgttcttcgatacaatagatgccattacttctcggaaacgatacattgtgtttgtacgaaataattccccgtgaagattagacccttgtctcgtgtacgaatcgtcggctgcaaatatgccatatgccgatgagtctcgtactgaagtggttttcaactattttgccgcccgatttgacgtgttatctcggagtccgatttatataaaatggagctcccacatgatcggttagtccaatttagctatatctgacctgagttagtagcataaggctcaaaggggaggcattccaagttggacatacctccccacttctcatgacgcattagaactgcaagacattggggacaatagtacactgtatatagccacttcatagcactatggccagctaaatcacctgtgtgaacatctacggccgctacaacttcgtgccacgccgatctgagagggccccagacatgttttcgcggcggtcccttttgccggcaaaaagcggcatttctggtccctgcttcgcaactcgcagcccccagacgcaaatcgggccagatatagtttgcttccctcagtccttcctgctaaatcggagccctccagcaaatcgggcccgatatatcggatcttggaccacccgatttgccaaaacggatgaaagccacgatacatatgcataaatccatgttataatgaagaagaagaagaaaaaaaaagaatcgagattgcaagttacctcaagatgtgttataatagttgtctagctgctaatgaatgccttgggttatcttgtgcggtcagcaaacacagtcggctggttggagtgtcctcgctatagataatcacgtgttcaatgcgtatcggataaccagggaatggtataatctgcgacgcttcatcgccgtacagtacatgtataacgcactatcacaatgctggtgaactagcacagagaccagtcagcttcccgtgatgctggcttgctccatcggtgtgtacccaccacaagctccaaccaagcccctctcatttcccagcttgctcttaagcacccaagtcgaacgatgcgcctcctccgtctggcagggctggcagggctgacatgcgtcgcagttgccacgcgagttgaccgaatgcgtcggttgcaggttcctctgtacttgtatcccatgctacaagctggtctactgttcaaactacaagccaagatgatagccccgcgacgagatttttacgagctgcacgagccaaccacgacgatgacgacgcggagagagcaggattctccctgccaggtttcgaaatgctgacaacgctcttgaagccaacccaagcacaacttcagaaactattgatcaatggagagtccgcagacgatgttttcactcgcatgaagccgaataaggctggtaacttgttgttgcacgacgaagagttcgctcggtggctcacatacgctgacgatctgaagatcaagcaccccgcgatcaagacgtcagcgatcttgacgttgactgctcactatggtgacgatggtttgtacaaactgatcgaagctggcctaaagaacgaaggaacggaaacagttgcaacgaaattgaaaaccgagctaatgaagcactgggtagccactgccaaagtcccggacaaggtctttcacattatgaagcttgacaaggtagagacagacattctcagcaaccccgaattcatcaactgggcgcggtacgtggacgatttcaatgcgaagtaccacaagcagtcaacgtcgatggtgccgacagtcctgaactactacagtgacgacgttatcttcaaaatgaccgaggcggcgaagagtgtggaagaaaccaaagccatcgccaccaagctgcaggaagaactggtccaagcctggttgaaaagcaagaaaacaccagacgaggctctggtagatttcggactcggaaagaaaacccgctactccaaaaatccggtcgaaccgctgttggagagggcgctgttcaacagttgggtcaagtacttggacgattacaacgtgctgtatcccgagaagaaaacgactgtaatcgaggcactgacgaggagatttggtgatgcaaatgtggccaagatgattacgaaggcaaagaaggaggttgttacgcgcagccttgccacaaaactggaggctgcacagcttgaaatatggttgagcagcggaaaatccgtcgaagacgtgttcaacttactgaagctcgactatgctggtgtattcttctcagagcatcatctcatcaacacgttggtctcgtacatgaatgtcttcatcaaggagaaccctagcaaggccgctacggtattctcgacagtagagacgctccttgagggcagacccctaggtcaaatcctcatgttagccgcgtagtaccccagtatggaaggcgctgcaactcaagtccagatgaagctgatcctgagctacacggcaaacaacgaatctcccagggaaatattcaacatactcgccctggatgaggtcggagattccattctggccaacccgcttttctctcaatggatgacgtatgtcgaggcctacaacaagaagaatccacagcatcaagagtcatggttcctaccgcttcaaattaagtatgaatggcatggcgtcgaacggatgatcgatgcggcgatgaagaacccaagcaccgtgaaaatcgccaagctggtggagagggagtggataaagacatggttagacgagaagaagcttcccgagcaagcgtttaagttccttcggctcaacgacgctggtgagaatgcgctttccgatcccaagttcagagtatgggccaagtacctgagagactttaaccatcgctatcccgaggataaaacgacgatgctcgacggaatccgggcgatctacaaggatatcgctgttgtgccgatgcttaatgcggcgaaggagcaatccgccacgaagaaactggcgacgaacttggagaatgcactaatcagcaaatgggtcgctgaagagcagaagccagcgcaccttaagtacatattctctgctgatccaaacgccgatgacatgatcgcacggagtcgctggggattttcttgcagcagttaatatagctacgcatgatgtatctgattggtagaaaggtaagccaataggaggtcagtgtaggtacgactcaccgtaggtatagtgaaaccaagttaaaatagatatgcagatgtaaggcggctgtggaggcttcgcgaagcttccatccgcctgaactgcgggggcggcactcttagttccgcacgccctcccccaagacagcacttcttcttgttaaactggtagcacttgttggtcccagcaacctgactacaagaagcccatgccgacgaacgcccagctacgagccgagatcgaccggctgaatcaagcgatggtagagcgcacgcgagtgcccaccaatctgcccaagttcaccggcaagcggggggaagacgttcgcgaatggctgttccagatcgagaacgcctgtcgcatcaacggaatccgaatcgaagacgcgagcgcgcgtctgccgggtatcgccgggtcggcgatggaaaagcctgcctcaggatggttcttgcactggtcatcgacgacgagaagtgaggagcacacgtgggggattctccgtgagcatgtgctccaagacttcgaagcttcgaactaccaggccgtcttgcgagaaaagctgcagcgactcaagcaaacggcggccatcgagacctacaacggcgagtactctgctcttatcttccgagttgagggcatgagtgtacttgaccaggtgctaagctacgcaaacggtctcaagcctcgtacccgtagctacgtcaagctcgagaacccagagacgctgagcgcggctatggacctggcgatcaagtacgaagttacgcactttgtggacgacgtgcgcgaccgccagtcccgccaagacaagaggaagatcttcgctgatcaagctcccaagcaagacaagccattcaaagggaaacctttccgcggcaagggacggttcaagccgaggtctgactccaagcgtactgaaggccgcacctgctatcactgcaagaagcctggccacatcaaggccaactgtttcctctggaagaaggagcaagagaagcagggaaacgagcaaccacgtcagtgaatgagggtcctggcgtggacgagagcgtaaccgggacaccaaagattgagaatatcagcttgaacgttctgtgcgaaaaccctctggtctacaagtcacgtccactgttctccgtaacaggtgaaatcagtgttggtgacaagtgtctggcgacacgaagcaagttgttggactgtggagccaccacgatctacgtatccaagcgttgggtcgaggagcaccagcttcagacaaccaagttcagcgacaagaacattcgtgtcaagctgggagacaaccaaattgtcgaggcggagcttgaaattctgctgatagagattctggcctcgaggctggacgacgcctacaagtgtgtggcagtcgtctacccgattccagacgaattcgattgcattcttggaataccattcttcgaagacatgcaaccacatattgactggagaggtcgacgaatcgaaggaacgagaacgaggactctgcactggaagcgaacagggaagacctgtgagccgatcgaggaaggcggaccggtgattacctccgggcttcggagatctgtcgaggcgaaaggcctatcggcgaaaagacccgctggaaacggatgtgaagctcacggttgaagctgttggtgacgcagtgcagaagaaatccccaagtgttgtccgcggacgacatgatgacgcgcaagctggcaagagttcagctggagacgacgacgttgcgacgtctgagcgcgagagtactgtagtcgaggctgatggaagcagcagtaccaggggtggagacaacgccgtggagaagatgttcacgatgggagttgtcgacgagagtggtatacagaccaaatacatcacgcgcaagaagttgcggaagttcttgagaatcaagaccaagacgagcgacgagcctgacttcatgttggtgctgtcgaacgagacgatcaagcaagttgcacgttcactgcaacgccgagatcagcccgacaacgttgggagtgcgaaagcacaacgctatctggagacagactgggacaccttccgagagaatccagctttcaatcttctcatggagtataaggacaacgtgtttcgtccagaactacccgaaggtttaccagagaagcgtgacatcgaacaccggatcggtgtgaaggatccaaatatggcgatgtaccggcagcagtggcgacagtcgccggagcagctgcgtgaaatcgtgcgctgggtcgaagacatggtgaagaagaagctcattcgaccaagcatcagccccacgcagccccaacattctgtgtccggaaaccagttggctggagaattgttcacgactaccggtacttgaattcgaacaccgtgcgtcaaaggatcccgatgacgaggaaggaagacatccttgatgccatgtccggtgcgtactggttctccacgatggacctgatgtccgcgtactaccaagtgcgcatgcgggaagaagacatcaagtttaccgcattccaagcgccggacggtctctgggagtatctcgttcttccaatgggagtttgcaacgcaccagcaacgatgcacagattgacatcgaagctctttcgagacttgaagaacacgaagtcgttctacgatgacatctatgttttcaccaagtcaccgaagatcgaggaccatctggacgcactgcggaaaacacttgacatcttgtgtgataacaagttgtacgtcaagctctccaagtgtgtcttctgctccgacgagatcccgtgtctcggagatttcgtagggcgaaatggagttcggatggatccagacaaggtgcagaccatcaaggactggcctgtaccacggacgcaagaagagcttcacagcttccttggcttgacaggttacgtccagcgattctgtccagagtacgcatctctgacagcctccatgtttgcgctcttgaagaagaagaacaagcggaacgccaagattcatctcagcgacgagcagcggaagaacttcaaggagttgaagcggcgactgtgcaacccgccagtattgcacttgccggatttcagcagccccatgcatctgcgtaccgacgccagcaagtttgctgtcggtggagtcctttttcaagtggtggacggagttgagcgcccgatagcgtacacaagccggaatatgaagtcggcggagctcaactatccgactcagcagcaggagctactggcggtcgttcatgcgctggcagcgtttcggatctactgcctggacaaaccacccatcgtcgagacagatcacaaaaatctcgaaggactgttcacccagaagatggccaaccgtcgactcgctcgttggtacgacatccttgcggaataccagccgacgttctcgtaccttcccggtgcgaagaatggcatcgcagacgcgttaagtcgaaggtcagacttacaaccggagacgaagttcttccacgacttacgggtgaccagcttcgacgacacatcctccagcctcgcgatcagcgaagtaacgggtgactcggagctgattacgcgcatcaagaaagcgtacaagaaagatcgtgatgtccaagcaatcttgacagcaatcaagcgacgcaaatccgactcaaaaccaaagcgcgaacaccagcagcacaagaaataccgctgctactccgaagcgaacgggttactgtggtatcaaacgcctgcagatgacgctccacggattgtcgtgcccaacgatgtgaagttgtgacagacaattatcagcgagtgtcacgacaccaactacggaggccatcccggtgcggaacgtacgtacttgacactggcgcgccattggtactgctcaaagatgttgaggtccatccagaagtttgtcgctgtcggcccagacgagcgttggagatccatctccatggacttcatcactgatctgccgcgaacggagcggggcgtcgactctatctgggtcgtcgtcgatcggttgaccaagcggtgtcatttcgtgccaaccaccaagaaggtgaacgccgaaggtgttgctcgactctttatcgacaacatctggaagttacacggcatgccgacgaatatcgtctccgaccgcgacaggaagttcgtgtccgccttctggcagcatgtcttcaagtccatcgggacgaagctaagcatgaccgttgcacatcgcgctcaaggtgacggacaaacggagcacatgaaccgaaccttggaagagtatcttcggtgcttcgtcggtccacttcaagatgattaggacgtccatctcgccaacgctgagttcgctgtcaactcgactgtcaactccagcacgaagcttgcgccgtttgaagccgatctgggctacattccgctgaatccacttcaacttgcatccgagcaacttgagagtgttcccaagagtcgacgcggagcagagtttcacgagcgacaggccgcgattctcttacgctgtcgcgaagcgttagctcaggcccaagaacggatgcgcgacgtctacgaccgaaaccgtgttgagcagatcttcgaagttggtgacagggtctacttgagcacgaagaatctggacccgaagcactccggcttgcccaactccaccaagttcggacccaagtggattggaccgtacaccgtggtgcggaagattcataaccacgcgtacgagctcaacatccaggctggcaacaagctgcatcccgtcttcaacactgcgtcattgaagccgtacaaggagccaactcgcttgtcgaggccaagcgacgtaatcttagcgaacggcttcattggccagatcgtcaaggcattacgtggaaagcgaacgcgaaaacggcggatccaatatcttgtggagtgggtgggcgaggagaaacaaacctgggaaccagtggagaacttgtcgcaagtcccagatctcatcgcggaatttgaatctgcaaggcgaaagaagcgtcgaaaacggtgaagcaggatcagctgaagggggactcaaaggcctacatgtattcccgtattacatcccctcttgttgcagaacctgctgcttcatgcgcttctcccgctttttctgcgtcttcgacttgcgcttgccgtggcgacacttgtatcctggttgcagctccacttgcgccatccatttcacgtgctgaatccactgctggtaacgcagaggaagaatgtccaccggcgggttcttgcgggcattgaaattgtcaagagccagaagttgcttctccggaccacggttaaccacgacaaagcagtgcccgacatcattgtggccagcgctgacgacgtaaacaccgggtgcttgtttgcggcaaacaccttggagcgtcgtgatgttggcacttgactctggaagaacgtttcggagaaggacgtcgtagttcagtggcacactcttgcgctgcagaactttgaagaactccgtcacgtcatcgcgagacacaccgtactggatggcttcaggtcgcgtgtcttcatacgcatcccacatctccattgtgactagatccggctgtccgagatagtacaaggccgagcggaaagcatccatgaaacaagtaccagcctccgacgcggaatcacgctccgagtaccaataacagaaggtgcgcttgtctcccgattccttccaagcgtccaccatcctcatcatgtagcgcgtcgacggtttgtcgagctgctccatccagacccagcttagctgtagcggattgccttcccattccataaagtagcaacggtgcggagccttgcccctgacatccaaggcacggacgatgtcaacctcagtgttgtaatcccaaggcttcttcgggtcgtagtggttcttgcggttgttcgacgggtgctttttgggcgccggaggaagcggcatcggatgacacgtcgaagtctcgtcatcgtgacgcaagcgcgagcggtcaacctgaggcaggccttcattgtcgtcactatcatcgaaaagcccggattcatcttcaggcgaggcctcaaaggtcgccccaagcgcaggctcagcagctatcgcctcctcgacagacaacccttccacatcgagcatgaagatcaactcctggaggcgcgtaggtggagaaaaaccaccagccgaagcaacaacctcacgcggcgctggcgacgcaggcggcggcaccggggacgccgagtccgaatctggagagccaagaccgggagagcgactggtgagctctaattcttcccacacacgcaccatctcttcgtcaagaccggagtcagcatcgctgtcttcaccagcagcggccacaacatcgacaatctgcgcgagcgcggcggcgcattcagagtctgccggcgcggccggcgtggcggcgccaggcggaagcatggacggaccatcgagatttgcggtcgccagaggcgacgcagacgacggagcctcaacatcatgatcagccgtcgctggaggcgaggcagaacgcgcggaagcaggagactgcattccggcagcagtagaaaccgctagcgacacaaccatcagcccaaggaaccaatccaagcctccaacaaccaggccgaggcgaaggagaagcgaggtcggactaattcctcaggcgacagccggaagcgtcgcggttctctgtctttttcgggaatgacaagtcggaagggcgcgcagccagagaaggggtgagtgtatctgattggtagaaaggtaagccaataggaggtcagtgtaggtacgactcaccgtaggtatagtgaaaccaagttaaaatagatatgcagatggagggcggctgtggaggcttcgcgaagcttccatccgcctgaactgcgggggcggcactcttagttccgcacgccctcccccaagacagcagttcttcctgttaaacgtgatgtaacaagcaaacaacgatctatcttgatgcaattaatatttgttatggcggcgagggtggccctcgtgcttttctcctacctacagacgacgacacactctcccctgtcacttctcggctagacagtggaggggctggaatcggaattggttctggggttacagacgcggatgcggatgctgagcttacagacgtaggagtagtggggacggttgtgacttcaggaccaacgggtagcacagaggctttcgagcgttgccctaacagtcttgacgagggcggagacacgcttggctccggttgagtagcgagtttcttggtgcatatgagcggcacattgtgctcattgaagaacttcgccgtctcactttggctggggttcatattccagtttgccttgatgttgcgagccttttgacaccggtagataaagagcaacatgcttgccgccgctcgcatccgtctcaacggactcagcttgtgcatatcgcggtgcgcgagcttaaccacgccgctgatcgtgataatcgctcctaccgtgaacattgccagagctaggggagacatttgcgcgaactctttaaagtacacgccaccgccgaagatggagacggagatgaagaagcactggaacacgggcacgacgaagacggcgtcgaacttctgcagcccgtgcgcgagccagtggatctgcaggaagacgcacaggaacatgctgagcgtgatagcgtaggcgccgaacgtcacgaactgattgtcgccctcgatcgtcgtcttcatgagctccgccatggatttggcgaatagcacggactgcgcgccaaagatcccggacaaggcggggtagctcactggatgcagcttgcggaagcggttgtactctggcgaggttctccctttatgcctgagtgtttgctccatcttgcgcactagcaggaagagtacaacgcacgacacgcacatgagtgttgcgtacacagcgaagagcggttcccggtagagcgctacgagctcgtgcacggtgtagcacttgctctccttctcggcgaaggtggcgacgacgatgatgcccagcagcacgagcgcggtgccaattgcatcggacctggtaaacttttccttgagaaatagcgacgcgaagacaacgttcgccaccattgtagagcctcccactggggtcgctagagactgcgggaggaagccgagagccacaaagtcgagaatgctgccgcccaccacgagcagcagtccgatgacccacagcggctggcggaagtagccgcgcttgtcgacgacgctgcggcccttagcttcgcgcatgaaggagaacttctgcaggttgacgcccatgttggtgcagatggagcccacgatgctcaggatcacgcccacgtaccagaggccgttggacttctcggcgtgctcgtcgcagcccatgacttgacttagcttggctcggatcggaacagacggaaggcaacggtgctggcacttcagggtctctcgttgtgcttcagttccctgccccacgatggcaagcaagctcggtatttatacttcgggctgagtcgtccatcaaaatgcgtgtcataagacccactaatagccagagttgaagagccagttttacttggtttttgtatggtccaagttgaagtcggtgtaaccatgtttagtccaaatagcaaggcaagcaaagcagtgacgcggcagcttggctggctactgtggcgtcgcctcgtaactggccaagattgatgaatgacgctcccacgatacagcgttgcctgtgcaagctcctgtccatgatcatgttactgccagtactgagcccattaaagcatgaagcggcgcaaaaactttgccacggcagaagcacgaaacgccgagaacgctgccagctgagagctgctatctctttgccttgcttgcttgtcatcttgcatccagtcaaatattgacgaggaaaaacatcattgcgcgccgcttcgcgcaccagattcattgcgtgtcactgctcggcggcactaaacttcgaaagatcttcccgtctctgcttggacactcaagttgcttatctattcactcacgactgtattacaggcgagacctacctcgccttccttcctccttttcatccctacgacctatcctactcgcgagcgccacacgaaagcactcgcaacctataagaacctacgcaacgcaacactacaacacctatcttacttccccccacgtttcaatcagcacagaatggactgcagcgacatgggtacactcgctcgacgagtgttgagacgctgagcgtcaggcccacgctcacccccatccgtcgtccaatcctgtggagccgcaatgggcgacacagcagcagcggtcgccgcaccactcgcggcctcttcatcgtccgaaagtgcggtcttagccattgccgccggcgtcttcttgcggcccttggctcggttgccgcgcttgaccatctcctccgtggcgggggaggccagccgcccggccgagatgcccttggccgccgtgttggggtcctgcatgatgcactcgagcgtgtactcgaaggccgcgatcttcttggcgatgtactccttgttgctgcccttggccacgctcagcgactctcgcagcatgtcgatgctcttctgcaggctgcggatctggcggtgcggccagcgctggatgccgtggcggcggcagatcttcttgagcagcgtggcgcagatgccgaacttgcgcgccacggcggcgatgggcatgttgaagcactcgcgcaggtcctcgagctgcaccacgggcccgtagcgcttgttgccgccgcgcggcgtcacgctgcgaggcgacggagacgctgcagctgatgcagccgcagggtgcagcggcagcttgaaggccatggggctcacggcgctgaaggcgtcgaagttgaagacgtcggcggggctcgaggccccggacgggccggcgggcagagacacctccacgctcaggccgcgcatcttgctgcggtactgcggctcgagcttgatgctgttggccgagtcgttgaggcgggggctgtcgcgcttgagcgacatgaggatctcgcccatgagcatgtcgtcgacgctgagcggcgtggcggccattgtgtcgagacttgacgaggcgactggagtcaggagctacgcgcgacgaagcggatcgagttgtgagtgagcgagcgggcgtgatggccattgcagagagggaacgcgtgccggccttccattttgcgggcgtgactgcatttcactatgcggtgggtgagagggaccagccgctaaacttcaaaaacctgcgggacttgatgatggctggtctctgagctgcatgggatcagatgtggtcgatacaaagagcaagtgaagcatgcgttctcccaggttctcgcgggaccgtggctctgcaccccatccctccgcatcccttcgagcgccttgctgcgaccttcgcgccacctcgcgccccttcggccacgcgagacactggcgcgagatctttcacgcagctgccgagtccgcaggcctcagaactgcctgggggcggcgaaggctcgcacgcttcaatgcattaccctagacctgtgccattgatgcctgtacatgtagacgcgtcggtgccagcgtcaaagtgcctcgggcggcggcggtggtgtcggaggcccgttccgccgcctcggtcggtcgggacgctgcgacactggattgacgccaccagatcatccacccttcccgtattttggccaatcctgtggctctgaccttgcgtgtcgccggatggcggtgtcgacgatcaccagtcgaacttcaacgcggacctccccgcacgcaaaggtctccgctatgctgcccagcgctgcagtgggaagactgcagcctgcaggtgcggtgagtttggtaggcgcagtgtagcccgggcattttggaatttagagcatacggtacatggaggtgcctacggttcaagggagcactgtgccgacgagaaaggctattgcgttgtcttcgtcggaacggccttcgactacatgtacgacttcgacacgccgtggcgcttctttaaacttcggtaggcagccagcactatttgctgttaaaatttgcgtggcaaagagtgaatttcttgaacaacagtcggattgcgtgaagtcaattctagtcgagccgtcacgggtcactggccttcggcaacgcattgaacagcttggtataccgctctaccacttcgtcgaccgcttcctcattgatgtacgtccgtttcaggccagccggcgtcttcttttcagatagccacttgccgataagagcaccctgctactctgtcgccagcgttttcgtgctctcatccttctttgccgcatcaagaatcgtcagcaacgcgctgaggccatcgaaaatagtcgtttcttggttggtatgcttcttgttgaaggcgtcgaggtacttgatccacgttttgatttctgggctcgcaagaacctcttcaggaggtacgacgttatggatcaaagcccagaacgcagactgggggagcgtatcagcctttagccagtactcaatccactctttctctagctcttcgccaatgtctctggtgcttgggttttgcatcgcgttcttcatcatcgttttcgacgttatagttgactctgatcgacgtaagccaggattctggattgctcgggttctttcggttgaaaatctgtgcgtagttcttccatgacttgaacagagcatcctcgagaatttcatgccccatactgccaagcgctagcagcttaaatagctcataggggtcttgattgctcgctgcatacgcctcaaacttctccatctggattgtagtcgtaatgttctccacgctcggatacttcttagctgcttggagggtctggttcagacgtctgccctcgaggcgagtctccaaattggagacaatcccagcatgttttcgacattggagactccaatgtcgaaaacatgctgggattgtctttgtggtagatattcacgtacgaaaaccactggtcaaggagaagattgtcgttatagacaagccggcggtggagctgtggcaacttgaacacgtcgtcggtcggctgattctccactgcttcgccacatttccagttgcacaaactccagtattatggcaacgcctcgtgtgaccttgttcgcctttgcgacaattaccatctccaccacctgtgtatcgccatacgcccgcgtaaacatttcaattattgtcgtcttttgctgcggatacttggcgttataagcttccatgtacctgaccaaaatactaaacagtgggttctccagcacagtgtccactttactcccgagtgagtgctgttccagaacatcatctggctcctgtctcgtgattccgctgccttgcggagccccagctcgatcagagcgttatccggtgtcttccgagcgctgaaccagtccagcctctaacttgacggcattgctcttggtttcatccgcgcccttcgcggcttcggccatgttgaatagaacactgctcctgaagtacttcatcagagacggagctactgacgttgttttatctggatgctttgcatagaaatcgtcgacgtacttggcccaagcgaggaattcgggattactaaggatgttcgtcttcaacttgtcaaggttcatcacgtgaaaaacgtcgtcaggaacgcttgctcggtctgtagccacgtcgcgacctctatcgtatctgagtatcgcgtggcggattttatcatgccatacggggcatcgtctccgtagtaaccagtcagtctcgagattgcgggcattgcctccttggggtgtttggcatttaaatcgtcaacgtacttgagccactgctggaacagggcagtgcccctccgacatcaggaagatacatgcgatagaagaccttatcagcagatttcccctttttgagccatttgttcagcttttccggggcaacgaccggacccgaatcttgcgtatcgtcttttcgaggaaagaaggtttgggcatccccgctctctcttcatcttctcgttcgtcgatgccgatgcttcgcaaaaatatctcagtagtgtggaagtcatcccagcttgataagacggaagggcccctcaccgacgcttctgcgtgaatacgcgcgatgaaggcgaggagagccaaggccaccaggggctggaggtacatcgtgctacttgttggttgagaggcaagttggaaaatgtaattccttgttgttgccaagtcttggaaagtctcatgattagatgagtgcacgttacaatatcgtgtacttgtacatgtacacatgtttacgcgttcagttcagaaaaatacgacatcggggcgcgcccaaaagagaaggaggcaagtaataaatgacgccaaggtaaggagctctcaagggccctcagtacaataatctttaggtaaaaaaaacaggagtatttaaatattcttaaaacaccatcattgaatactataagaactgtcgtttgcgccctgcggatgtttgagataatgcaacataaggtttttatgttgcattatcggttaaagagctatttgaaacaacagcaatgacagttgtacagcagttatattacagcatagcagcgcaaacgagatcgagcagcgtaatcgacccagcaaatgggcgcatgatacttcacagtacaaaaataagagcatgtgctaaaattcaagaacttcttcatgcagcgctcttctacggcaagcgtagcgctactacatagtactatcagtagtaaataaagtttttctaccgtgcaggttttggaatccagtaaaaaaaaaagcgaccgaactgcgaacatcgcgggccaaagcccgcaaaccagttaatggtggtgtttttatttagtttgttgataatatttccacttgtttgtcgccgtaagaaaacgttgtgagacttttcgggcgactgatgcttgcatacagagtgcgcgcatgtacaatatagcatgtaaatgtgtaaagttcagcagcgttggactcgcggctttctctactgtagttagttggggacacctgtaagttaattgcagcccatattttgtgtcgcctcaagtttctgaactttttcgagctacatcctctagcaagtactttcgaaataccagtgaaaagtactttcaaaacaacaggaagcacgggtgaaacacaaatcaaaacaaaaaaaccacacaacaaaccaaccaacaaggcaagtgacgaatcgggctttttccgttgatattcaggcttagccggaggagaaaatccaaaccgccgaccgatttcgcttgaatgacttgcaaagcaggccgccaacgagatcgacggcgcctaatactgtgggggccgcgctaacggccttcagcgggtagggtggacgtacggccattggggagacaagcatggtaagttaccatccccagcctccgccgcaacccacaccgccgccccagccccaaccgcctccccagccagcgccgccacatccccacggacggccccagccacctccccagccccacggacttcctccccagccccactccttcttgtccttcggctcgcctgccgtcggctgcgcgtccgtggcctccgccggtccggttgcggtggcgacgacagtcccgaccttgggagcgtcagccagagctcgaagcgcgggcgattcggcagcaacgacgcccgcggtggcgagcactgctgcgacggcaatggtggtgcacttcatgttgctgcttgggtacttgctagcttggtgtcgaggaggcaagttgcggtatggtgaatgacaccacgggtgcggccgaacgtcggtccaaggggtcagcacacgttggctccgcgcggagatttccgtcgaaatcggcccctttccgcatcaatcaggagatttttcgtcttgcaggcgattcagaggatcgcatgcttcgattaaagttagtcgatgagagtgctacgaattcgagggagtattcgatcggctgggcactctgtagcggtgtttttattgattttgcttaccgttttgtccgtttgtttgtctagagaataaactgctgtgagaattttcgggtgactcattgcttgcacacacaaacaatgtgaatgcataaagtacatgtgcagcatgtgcgtgtatgaagtatggcattcgcctagcgcggagtggttccaaccaaaatagtgaaacccaacattcaggcgctatgttgcgtcgccttcattttctgaactattttcagggcgcatgtaatagtttactttcaaaataggagtgaaaaatactttcaaaacaacaggaaccacgggtgaaacacaaaacaaaacaaaaaaaccacacaacaaaccaaccaacaaggcaagtgacgaatcgggctttttccgttgatattcaggcttagccggaggagaaaatccaaaccgccgaccgatttcgcttgaatgacttgcaaagcaggccgccaacgagatcgacggcgcctaatactgtgggggccgcgctaacggccttcagcgggtagggtggacgtacggccattggggagacaagcatggtaagttaccatccccagcctccgccgcaacccacaccgccgccccagccccaaccgcctccccagccagcgccgccacatccccacggacggccccagccacctccccagccccacggacttcctccccagccnnnnnnnnnnnnnnnnnnnnnnnnnnnnnnnnnnnnnnnnnnnnnnnnnnnnnnnnnnnnnnnnnnnnnnnnnnnnnnnnnnnnnnnnnnnnnnnnnnnnnnnnnnnnnnnnnnnnnnnnnnnnnnnnnnnnnnnnnnnnnnnnnnnnnnnnnnnnnnnnnnnnnnnnnnnnnnnnnnnnnnnnnnnnnnnnnnnnnnnnnnnnnnnnnnnnnnnnnnnnnnnnnnnnnnnnnnnnnnnnnnnnnnnnnnnnnnnnnnnnnnnnnnnnnnnnnnnnnnnnnnnnnnnnnnnnnnnnnnnnnnnnnnnnnnnnnnnnnnnnnnnnnnnnnnnnnnnnnnnnnnnnnnnnnnnnnnnnnnnnnnnnnnnnnnnnnnnnnnnnnnnnnnnnnnnnnnnnnnnnnnnnnnnnnnnnnnnnnnnnnnnnnnnnnnnnnnnnnnnnnnnnnnnnnnnnnnnnnnnnnnnnnnnnnnnnnnnnnnnnnnnnnnnnnnnnnnnnnnnnnnnnnnnnnnnnnnnnnnnnnnnnnnnnnnnnnnnnnnnnnnnnnnnnnnnnnnnnnnnnnnnnnnnnnnnnnnnnnnnnnnnnnnnnnnnnnnnnnnnnnnnnnnnnnnnnnnnnnnnnnnnnnnnnnnnnnnnnnnnnnnnnnnnnnnnnnnnnnnnnnnnnnnnnnnnnnnnnnnnnnnnnnnnnnnnnnnnnnnnnnnnnnnnnnnnnnnnnnnnnnnnnnnnnnnnnnnnnnnnnnnnnnnnnnnnnnnnnnnnnnnnnnnnnnnnnnnnnnnnnnnnnnnnnnnnnnnnnnnnnnnnnnnnnnnnnnnnnnnnnnnnnnnnnnnnnnnnnnnnnnnnnnnnnnnnnnnnnnnnnnnnnnnnnnnnnnnnnnnnnnnnnnnnnnnnnnnnnnnnnnnnnnnnnnnnnnnnnnnnnnnnnnnnnnnnnnnnnnnnnnnnnnnnnnnnnnnnnnnnnnnnnnnnnnnnnnnnnnnnnnnnnnnnnnnnnnnnnnnnnnnnnnnnnnnnnnnnnnnnnnnnnnnnnnnnnnnnnnnnnnnnnnnnnnnnnnnnnnnnnnnnnnnnnnnnnnnnnnnnnnnnnnnnnnnnnnnnnnnnnnnnnnnnnnnnnnnnnnnnnnnnnnnnnnnnnnnnnnnnnnnnnnnnnnnnnnnnnnnnnnnnnnnnnnnnnnnnnnnnnnnnnnnnnnnnnnnnnnnnnnnnnnnnnnnnnnnnnnnnnnnnnnnnnnnnnnnnnnnnnnnnnnnnnnnnnnnnnnnnnnnnnnnnnnnnnnnnnnnnnnnnnnnnnnnnnnnnnnnnnnnnnnnnnnnnnnnnnnnnnnnnnnnnnnnnnnnnnnnnnnnnnnnnnnnnnnnnnnnnnnnnnnnnnnnnnnnnnnnnnnnnnnnnnnnnnnnnnnnnnnnnnnnnnnnnnnnnnnnnnnnnnnnnnnnnnnnnnnnnnnnnnnnnnnnnnnnnnnnnnnnnnnnnnnnnnnnnnnnnnnnnnnnnnnnnnnnnnnnnnnnnnnnnnnnnnnnnnnnnnnnnnnnnnnnnnnnnnnnnnnnnnnnnnnnnnnnnnnnnnnnnnnnnnnnnnnnnnnnnnnnnnnnnnnnnnnnnnnnnnnnnnnnnnnnnnnnnnnnnnnnnnnnnnnnnnnnnnnnnnnnnnnnnnnnnnnnnnnnnnnnnnnnnnnnnnnnnnnnnnnnnnnnnnnnnnnnnnnnnnnnnnnnnnnnnnnnnnnnnnnnnnnnnnnnnnnnnnnnnnnnnnnnnnnnnnnnnnnnnnnnnnnnnnnnnnnnnnnnnnnnnnnnnnnnnnnnnnnnnnnnnnnnnnnnnnnnnnnnnnnnnnnnnnnnnnnnnnnnnnnnnnnnnnnnnnnnnnnnnnnnnnnnnnnnnnnnnnnnnnnnnnnnnnnnnnnnnnnnnnnnnnnnnnnnnnnnnnnnnnnnnnnnnnnnnnnnnnnnnnnnnnnnnnnnnnnnnnnnnnnnnnnnnnnnnnnnnnnnnnnnnnnnnnnnnnnnnnnnnnnnnnnnnnnnnnnnnnnnnnnnnnnnnnnnnnnnnnnnnnnnnnnnnnnnnnnnnnnnnnnnnnnnnnnnnnnnnnnnnnnnnnnnnnnnnnnnnnnnnnnnnnnnnnnnnnnnnnnnnnnnnnnnnnnnnnnnnnnnnnnnnnnnnnnnnnnnnnnnnnnnnnnnnnnnnnnnnnnnnnnnnnnnnnnnnnnnnnnnnnnnnnnnnnnnnnnnnnnnnnnnnnnnnnnnnnnnnnnnnnnnnnnnnnnnnnnnnnnnnnnnnnnnnnnnnnnnnnnnnnnnnnnnnnnnnnnnnnnnnnnnnnnnnnnnnnnnnnnnnnnnnnnnnnnnnnnnnnnnnnnnnnnnnnnnnnnnnnnnnnnnnnnnnnnnnnnnnnnnnnnnnnnnnnnnnnnnnnnnnnnnnnnnnnnnnnnnnnnnnnnnnnnnnnnnnnnnnnnnnnnnnnnnnnnnnnnnnnnnnnnnnnnnnnnnnnnnnnnnnnnnnnnnnnnnnnnnnnnnnnnnnnnnnnnnnnnnnnnnnnnnnnnnnnnnnnnnnnnnnnnnnnnnnnnnnnnnnnnnnnnnnnnnnnnnnnnnnnnnnnnnnnnnnnnnnnnnnnnnnnnnnnnnnnnnnnnnnnnnnnnnnnnnnnnnnnnnnnnnnnnnnnnnnnnnnnnnnnnnnnnnnnnnnnnnnnnnnnnnnnnnnnnnnnnnnnnnnnnnnnnnnnnnnnnnnnnnnnnnnnnnnnnnnnnnnnnnnnnnnnnnnnnnnnnnnnnnnnnnnnnnnnnnnnnnnnnnnnnnnnnnnnnnnnnnnnnnnnnnnnnnnnnnnnnnnnnnnnnnnnnnnnnnnnnnnnnnnnnnnnnnnnnnnnnnnnnnnnnnnnnnnnnnnnnnnnnnnnnnnnnnnnnnnnnnnnnnnnnnnnnnnnnnnnnnnnnnnnnnnnnnnnnnnnnnnnnnnnnnnnnnnnnnnnnnnnnnnnnnnnnnnnnnnnnnnnnnnnnnnnnnnnnnnnnnnnnnnnnnnnnnnnnnnnnnnnnnnnnnnnnnnnnnnnnnnnnnnnnnnnnnnnnnnnnnnnnnnnnnnnnnnnnnnnnnnnnnnnnnnnnnnnnnnnnnnnnnnnnnnnnnnnnnnnnnnnnnnnnnnnnnnnnnnnnnnnnnnnnnnnnnnnnnnnnnnnnnnnnnnnnnnnnnnnnnnnnnnnnnnnnnnnnnnnnnnnnnnnnnnnnnnnnnnnnnnnnnnnnnnnnnnnnnnnnnnnnnnnnnnnnnnnnnnnnnnnnnnnnnnnnnnnnnnnnnnnnnnnnnnnnnnnnnnnnnnnnnnnnnnnnnnnnnnnnnnnnnnnnnnnnnnnnnnnnnnnnnnnnnnnnnnnnnnnnnnnnnnnnnnnnnnnnnnnnnnnnnnnnnnnnnnnnnnnnnnnnnnnnnnnnnnnnnnnnnnnnnnnnnnnnnnnnnnnnnnnnnnnnnnnnnnnnnnnnnnnnnnnnnnnnnnnnnnnnnnnnnnnnnnnnnnnnnnnnnnnnnnnnnnnnnnnnnnnnnnnnnnnnnnnnnnnnnnnnnnnnnnnnnnnnnnnnnnnnnnnnnnnnnnnnnnnnnnnnnnnnnnnnnnnnnnnnnnnnnnnnnnnnnnnnnnnnnnnnnnnnnnnnnnnnnnnnnnnnnnnnnnnnnnnnnnnnnnnnnnnnnnnnnnnnnnnnnnnnnnnnnnnnnnnnnnnnnnnnnnnnnnnnnnnnnnnnnnnnnnnnnnnnnnnnnnnnnnnnnnnnnnnnnnnnnnnnnnnnnnnnnnnnnnnnnnnnnnnnnnnnnnnnnnnnnnnnnnnnnnnnnnnnnnnnnnnnnnnnnnnnnnnnnnnnnnnnnnnnnnnnnnnnnnnnnnnnnnnnnnnnnnnnnnnnnnnnnnnnnnnnnnnnnnnnnnnnnnnnnnnnnnnnnnnnnnnnnnnnnnnnnnnnnnnnnnnnnnnnnnnnnnnnnnnnnnnnnnnnnnnnnnnnnnnnnnnnnnnnnnnnnnnnnnnnnnnnnnnnnnnnnnnnnnnnnnnnnnnnnnnnnnnnnnnnnnnnnnnnnnnnnnnnnnnnnnnnnnnnnnnnnnnnnnnnnnnnnnnnnnnnnnnnnnnnnnnnnnnnnnnnnnnnnnnnnnnnnnnnnnnnnnnnnnnnnnnnnnnnnnnnnnnnnnnnnnnnnnnnnnnnnnnnnnnnnnnnnnnnnnnnnnnnnnnnnnnnnnnnnnnnnnnnnnnnnnnnnnnnnnnnnnnnnnnnnnnnnnnnnnnnnnnnnnnnnnnnnnnnnnnnnnnnnnnnnnnnnnnnnnnnnnnnnnnnnnnnnnnnnnnnnnnnnnnnnnnnnnnnnnnnnnnnnnnnnnnnnnnnnnnnnnnnnnnnnnnnnnnnnnnnnnnnnnnnnnnnnnnnnnnnnnnnnnnnnnnnnnnnnnnnnnnnnnnnnnnnnnnnnnnnnnnnnnnnnnnnnnnnnnnnnnnnnnnnnnnnnnnnnnnnnnnnnnnnnnnnnnnnnnnnnnnnnnnnnnnnnnnnnnnnnnnnnnnnnnnnnnnnnnnnnnnnnnnnnnnnnnnnnnnnnnnnnnnnnnnnnnnnnnnnnnnnnnnnnnnnnnnnnnnnnnnnnnnnnnnnnnnnnnnnnnnnnnnnnnnnnnnnnnnnnnnnnnnnnnnnnnnnnnnnnnnnnnnnnnnnnnnnnnnnnnnnnnnnnnnnnnnnnnnnnnnnnnnnnnnnnnnnnnnnnnnnnnnnnnnnnnnnnnnnnnnnnnnnnnnnnnnnnnnnnnnnnnnnnnnnnnnnnnnnnnnnnnnnnnnnnnnnnnnnnnnnnnnnnnnnnnnnnnnnnnnnnnnnnnnnnnnnnnnnnnnnnnnnnnnnnnnnnnnnnnnnnnnnnnnnnnnnnnnnnnnnnnnnnnnnnnnnnnnnnnnnnnnnnnnnnnnnnnnnnnnnnnnnnnnnnnnnnnnnnnnnnnnnnnnnnnnnnnnnnnnnnnnnnnnnnnnnnnnnnnnnnnnnnnnnnnnnnnnnnnnnnnnnnnnnnnnnnnnnnnnnnnnnnnnnnnnnnnnnnnnnnnnnnnnnnnnnnnnnnnnnnnnnnnnnnnnnnnnnnnnnnnnnnnnnnnnnnnnnnnnnnnnnnnnnnnnnnnnnnnnnnnnnnnnnnnnnnnnnnnnnnnnnnnnnnnnnnnnnnnnnnnnnnnnnnnnnnnnnnnnnnnnnnnnnnnnnnnnnnnnnnnnnnnnnnnnnnnnnnnnnnnnnnnnnnnnnnnnnnnnnnnnnnnnnnnnnnnnnnnnnnnnnnnnnnnnnnnnnnnnnnnnnnnnnnnnnnnnnnnnnnnnnnnnnnnnnnnnnnnnnnnnnnnnnnnnnnnnnnnnnnnnnnnnnnnnnnnnnnnnnnnnnnnnnnnnnnnnnnnnnnnnnnnnnnnnnnnnnnnnnnnnnnnnnnnnnnnnnnnnnnnnnnnnnnnnnnnnnnnnnnnnnnnnnnnnnnnnnnnnnnnnnnnnnnnnnnnnnnnnnnnnnnnnnnnnnnnnnnnnnnnnnnnnnnnnnnnnnnnnnnnnnnnnnnnnnnnnnnnnnnnnnnnnnnnnnnnnnnnnnnnnnnnnnnnnnnnnnnnnnnnnnnnnnnnnnnnnnnnnnnnnnnnnnnnnnnnnnnnnnnnnnnnnnnnnnnnnnnnnnnnnnnnnnnnnnnnnnnnnnnnnnnnnnnnnnnnnnnnnnnnnnnnnnnnnnnnnnnnnnnnnnnnnnnnnnnnnnnnnnnnnnnnnnnnnnnnnnnnnnnnnnnnnnnnnnnnnnnnnnnnnnnnnnnnnnnnnnnnnnnnnnnnnnnnnnnnnnnnnnnnnnnnnnnnnnnnnnnnnnnnnnnnnnnnnnnnnnnnnnnnnnnnnnnnnnnnnnnnnnnnnnnnnnnnnnnnnnnnnnnnnnnnnnnnnnnnnnnnnnnnnnnnnnnnnnnnnnnnnnnnnnnnnnnnnnnnnnnnnnnnnnnnnnnnnnnnnnnnnnnnnnnnnnnnnnnnnnnnnnnnnnnnnnnnnnnnnnnnnnnnnnnnnnnnnnnnnnnnnnnnnnnnnnnnnnnnnnnnnnnnnnnnnnnnnnnnnnnnnnnnnnnnnnnnnnnnnnnnnnnnnnnnnnnnnnnnnnnnnnnnnnnnnnnnnnnnnnnnnnnnnnnnnnnnnnnnnnnnnnnnnnnnnnnnnnnnnnnnnnnnnnnnnnnnnnnnnnnnnnnnnnnnnnnnnnnnnnnnnnnnnnnnnnnnnnnnnnnnnnnnnnnnnnnnnnnnnnnnnnnnnnnnnnnnnnnnnnnnnnnnnnnnnnnnnnnnnnnnnnnnnnnnnnnnnnnnnnnnnnnnnnnnnnnnnnnnnnnnnnnnnnnnnnnnnnnnnnnnnnnnnnnnnnnnnnnnnnnnnnnnnnnnnnnnnnnnnnnnnnnnnnnnnnnnnnnnnnnnnnnnnnnnnnnnnnnnnnnnnnnnnnnnnnnnnnnnnnnnnnnnnnnnnnnnnnnnnnnnnnnnnnnnnnnnnnnnnnnnnnnnnnnnnnnnnnnnnnnnnnnnnnnnnnnnnnnnnnnnnnnnnnnnnnnnnnnnnnnnnnnnnnnnnnnnnnnnnnnnnnnnnnnnnnnnnnnnnnnnnnnnnnnnnnnnnnnnnnnnnnnnnnnnnnnnnnnnnnnnnnnnnnnnnnnnnnnnnnnnnnnnnnnnnnnnnnnnnnnnnnnnnnnnnnnnnnnnnnnnnnnnnnnnnnnnnnnnnnnnnnnnnnnnnnnnnnnnnnnnnnnnnnnnnnnnnnnnnnnnnnnnnnnnnnnnnnnnnnnnnnnnnnnnnnnnnnnnnnnnnnnnnnnnnnnnnnnnnnnnnnnnnnnnnnnnnnnnnnnnnnnnnnnnnnnnnnnnnnnnnnnnnnnnnnnnnnnnnnnnnnnnnnnnnnnnnnnnnnnnnnnnnnnnnnnnnnnnnnnnnnnnnnnnnnnnnnnnnnnnnnnnnnnnnnnnnnnnnnnnnnnnnnnnnnnnnnnnnnnnnnnnnnnnnnnnnnnnnnnnnnnnnnnnnnnnnnnnnnnnnnnnnnnnnnnnnnnnnnnnnnnnnnnnnnnnnnnnnnnnnnnnnnnnnnnnnnnnnnnnnnnnnnnnnnnnnnnnnnnnnnnnnnnnnnnnnnnnnnnnnnnnnnnnnnnnnnnnnnnnnnnnnnnnnnnnnnnnnnnnnnnnnnnnnnnnnnnnnnnnnnnnnnnnnnnnnnnnnnnnnnnnnnnnnnnnnnnnnnnnnnnnnnnnnnnnnnnnnnnnnnnnnnnnnnnnnnnnnnnnnnnnnnnnnnnnnnnnnnnnnnnnnnnnnnnnnnnnnnnnnnnnnnnnnnnnnnnnnnnnnnnnnnnnnnnnnnnnnnnnnnnnnnnnnnnnnnnnnnnnnnnnnnnnnnnnnnnnnnnnnnnnnnnnnnnnnnnnnnnnnnnnnnnnnnnnnnnnnnnnnnnnnnnnnnnnnnnnnnnnnnnnnnnnnnnnnnnnnnnnnnnnnnnnnnnnnnnnnnnnnnnnnnnnnnnnnnnnnnnnnnnnnnnnnnnnnnnnnnnnnnnnnnnnnnnnnnnnnnnnnnnnnnnnnnnnnnnnnnnnnnnnnnnnnnnnnnnnnnnnnnnnnnnnnnnnnnnnnnnnnnnnnnnnnnnnnnnnnnnnnnnnnnnnnnnnnnnnnnnnnnnnnnnnnnnnnnnnnnnnnnnnnnnnnnnnnnnnnnnnnnnnnnnnnnnnnnnnnnnnnnnnnnnnnnnnnnnnnnnnnnnnnnnnnnnnnnnnnnnnnnnnnnnnnnnnnnnnnnnnnnnnnnnnnnnnnnnnnnnnnnnnnnnnnnnnnnnnnnnnnnnnnnnnnnnnnnnnnnnnnnnnnnnnnnnnnnnnnnnnnnnnnnnnnnnnnnnnnnnnnnnnnnnnnnnnnnnnnnnnnnnnnnnnnnnnnnnnnnnnnnnnnnnnnnnnnnnnnnnnnnnnnnnnnnnnnnnnnnnnnnnnnnnnnnnnnnnnnnnnnnnnnnnnnnnnnnnnnnnnnnnnnnnnnnnnnnnnnnnnnnnnnnnnnnnnnnnnnnnnnnnnnnnnnnnnnnnnnnnnnnnnnnnnnnnnnnnnnnnnnnnnnnnnnnnnnnnnnnnnnnnnnnnnnnnnnnnnnnnnnnnnnnnnnnnnnnnnnnnnnnnnnnnnnnnnnnnnnnnnnnnnnnnnnnnnnnnnnnnnnnnnnnnnnnnnnnnnnnnnnnnnnnnnnnnnnnnnnnnnnnnnnnnnnnnnnnnnnnnnnnnnnnnnnnnnnnnnnnnnnnnnnnnnnnnnnnnnnnnnnnnnnnnnnnnnnnnnnnnnnnnnnnnnnnnnnnnnnnnnnnnnnnnnnnnnnnnnnnnnnnnnnnnnnnnnnnnnnnnnnnnnnnnnnnnnnnnnnnnnnnnnnnnnnnnnnnnnnnnnnnnnnnnnnnnnnnnnnnnnnnnnnnnnnnnnnnnnnnnnnnnnnnnnnnnnnnnnnnnnnnnnnnnnnnnnnnnnnnnnnnnnnnnnnnnnnnnnnnnnnnnnnnnnnnnnnnnnnnnnnnnnnnnnnnnnnnnnnnnnnnnnnnnnnnnnnnnnnnnnnnnnnnnnnnnnnnnnnnnnnnnnnnnnnnnnnnnnnnnnnnnnnnnnnnnnnnnnnnnnnnnnnnnnnnnnnnnnnnnnnnnnnnnnnnnnnnnnnnnnnnnnnnnnnnnnnnnnnnnnnnnnnnnnnnnnnnnnnnnnnnnnnnnnnnnnnnnnnnnnnnnnnnnnnnnnnnnnnnnnnnnnnnnnnnnnnnnnnnnnnnnnnnnnnnnnnnnnnnnnnnnnnnnnnnnnnnnnnnnnnnnnnnnnnnnnnnnnnnnnnnnnnnnnnnnnnnnnnnnnnnnnnnnnnnnnnnnnnnnnnnnnnnnnnnnnnnnnnnnnnnnnnnnnnnnnnnnnnnnnnnnnnnnnnnnnnnnnnnnnnnnnnnnnnnnnnnnnnnnnnnnnnnnnnnnnnnnnnnnnnnnnnnnnnnnnnnnnnnnnnnnnnnnnnnnnnnnnnnnnnnnnnnnnnnnnnnnnnnnnnnnnnnnnnnnnnnnnnnnnnnnnnnnnnnnnnnnnnnnnnnnnnnnnnnnnnnnnnnnnnnnnnnnnnnnnnnnnnnnnnnnnnnnnnnnnnnnnnnnnnnnnnnnnnnnnnnnnnnnnnnnnnnnnnnnnnnnnnnnnnnnnnnnnnnnnnnnnnnnnnnnnnnnnnnnnnnnnnnnnnnnnnnnnnnnnnnnnnnnnnnnnnnnnnnnnnnnnnnnnnnnnnnnnnnnnnnnnnnnnnnnnnnnnnnnnnnnnnnnnnnnnnnnnnnnnnnnnnnnnnnnnnnnnnnnnnnnnnnnnnnnnnnnnnnnnnnnnnnnnnnnnnnnnnnnnnnnnnnnnnnnnnnnnnnnnnnnnnnnnnnnnnnnnnnnnnnnnnnnnnnnnnnnnnnnnnnnnnnnnnnnnnnnnnnnnnnnnnnnnnnnnnnnnnnnnnnnnnnnnnnnnnnnnnnnnnnnnnnnnnnnnnnnnnnnnnnnnnnnnnnnnnnnnnnnnnnnnnnnnnnnnnnnnnnnnnnnnnnnnnnnnnnnnnnnnnnnnnnnnnnnnnnnnnnnnnnnnnnnnnnnnnnnnnnnnnnnnnnnnnnnnnnnnnnnnnnnnnnnnnnnnnnnnnnnnnnnnnnnnnnnnnnnnnnnnnnnnnnnnnnnnnnnnnnnnnnnnnnnnnnnnnnnnnnnnnnnnnnnnnnnnnnnnnnnnnnnnnnnnnnnnnnnnnnnnnnnnnnnnnnnnnnnnnnnnnnnnnnnnnnnnnnnnnnnnnnnnnnnnnnnnnnnnnnnnnnnnnnnnnnnnnnnnnnnnnnnnnnnnnnnnnnnnnnnnnnnnnnnnnnnnnnnnnnnnnnnnnnnnnnnnnnnnnnnnnnnnnnnnnnnnnnnnnnnnnnnnnnnnnnnnnnnnnnnnnnnnnnnnnnnnnnnnnnnnnnnnnnnnnnnnnnnnnnnnnnnnnnnnnnnnnnnnnnnnnnnnnnnnnnnnnnnnnnnnnnnnnnnnnnnnnnnnnnnnnnnnnnnnnnnnnnnnnnnnnnnnnnnnnnnnnnnnnnnnnnnnnnnnnnnnnnnnnnnnnnnnnnnnnnnnnnnnnnnnnnnnnnnnnnnnnnnnnnnnnnnnnnnnnnnnnnnnnnnnnnnnnnnnnnnnnnnnnnnnnnnnnnnnnnnnnnnnnnnnnnnnnnnnnnnnnnnnnnnnnnnnnnnnnnnnnnnnnnnnnnnnnnnnnnnnnnnnnnnnnnnnnnnnnnnnnnnnnnnnnnnnnnnnnnnnnnnnnnnnnnnnnnnnnnnnnnnnnnnnnnnnnnnnnnnnnnnnnnnnnnnnnnnnnnnnnnnnnnnnnnnnnnnnnnnnnnnnnnnnnnnnnnnnnnnnnnnnnnnnnnnnnnnnnnnnnnnnnnnnnnnnnnnnnnnnnnnnnnnnnnnnnnnnnnnnnnnnnnnnnnnnnnnnnnnnnnnnnnnnnnnnnnnnnnnnnnnnnnnnnnnnnnnnnnnnnnnnnnnnnnnnnnnnnnnnnnnnnnnnnnnnnnnnnnnnnnnnnnnnnnnnnnnnnnnnnnnnnnnnnnnnnnnnnnnnnnnnnnnnnnnnnnnnnnnnnnnnnnnnnnnnnnnnnnnnnnnnnnnnnnnnnnnnnnnnnnnnnnnnnnnnnnnnnnnnnnnnnnnnnnnnnnnnnnnnnnnnnnnnnnnnnnnnnnnnnnnnnnnnnnnnnnnnnnnnnnnnnnnnnnnnnnnnnnnnnnnnnnnnnnnnnnnnnnnnnnnnnnnnnnnnnnnnnnnnnnnnnnnnnnnnnnnnnnnnnnnnnnnnnnnnnnnnnnnnnnnnnnnnnnnnnnnnnnnnnnnnnnnnnnnnnnnnnnnnnnnnnnnnnnnnnnnnnnnnnnnnnnnnnnnnnnnnnnnnnnnnnnnnnnnnnnnnnnnnnnnnnnnnnnnnnnnnnnnnnnnnnnnnnnnnnnnnnnnnnnnnnnnnnnnnnnnnnnnnnnnnnnnnnnnnnnnnnnnnnnnnnnnnnnnnnnnnnnnnnnnnnnnnnnnnnnnnnnnnnnnnnnnnnnnnnnnnnnnnnnnnnnnnnnnnnnnnnnnnnnnnnnnnnnnnnnnnnnnnnnnnnnnnnnnnnnnnnnnnnnnnnnnnnnnnnnnnnnnnnnnnnnnnnnnnnnnnnnnnnnnnnnnnnnnnnnnnnnnnnnnnnnnnnnnnnnnnnnnnnnnnnnnnnnnnnnnnnnnnnnnnnnnnnnnnnnnnnnnnnnnnnnnnnnnnnnnnnnnnnnnnnnnnnnnnnnnnnnnnnnnnnnnnnnnnnnnnnnnnnnnnnnnnnnnnnnnnnnnnnnnnnnnnnnnnnnnnnnnnnnnnnnnnnnnnnnnnnnnnnnnnnnnnnnnnnnnnnnnnnnnnnnnnnnnnnnnnnnnnnnnnnnnnnnnnnnnnnnnnnnnnnnnnnnnnnnnnnnnnnnnnnnnnnnnnnnnnnnnnnnnnnnnnnnnnnnnnnnnnnnnnnnnnnnnnnnnnnnnnnnnnnnnnnnnnnnnnnnnnnnnnnnnnnnnnnnnnnnnnnnnnnnnnnnnnnnnnnnnnnnnnnnnnnnnnnnnnnnnnnnnnnnnnnnnnnnnnaacaaggcaagtggcgaatccggagtttgcttttgataaaagaatccacgcttagcctgagaaaccgccgaccgatttcgattcaacgcgcttgaatgacttgcaaagcaggccgccaacgagatcgacggcgtctaacgctgtgaaaggccgcgctaacggccgtcagcgggtagggtggacgtacggccattggggagacaagcatggtaagttaccatccccagcctccgccgcaacccacaccgccgccccagccccaaccgcctccccagccagcgccgccacatccccacggacggccccagccacctccccagccccacggacttcctccccagccccactccttcttgtccttcggctcgcctgccgtcggctgcgcgtccgtggcctccgccggtccggttgcggtggcgacgacagtcccgaccttgggagcgtcagccagagctcgaagcgcgggcgattcggcagcaacgacgcccgcggtggcgagcactgctgcgacggcaatggtggtgcacttcatgttgctgcttgggtacttgctagcttggtgtcgaggaggcaagttgcggtatggtgaatgacaccacgggtgcggccgaacgtcggtccaaggggtcagcacacgttggctccgcgcggagatttccgtcgaaatcggcccctttccgcatcaatcaggagatttttcgtcttgcaggcgattcagaggatcgcatgcttcgattaaagttagtcgatgagagtgctacgaattcgagggagtattcgatcggctgggcactctgtagcggtgtttttattgattttgcttaccgttttgtccgtttgtttgtctagagaataaactgctgtgagaattttcgggtgactcattgcttgcacacacaaacaatgtgaatgcataaagtacatgtgcagcatgcgcgtgtatgaagtatggcattcgcctagcgcggagtggttccaaccaaaatagtgaaacccaacattcaggcgctatgttgcgtcgccttcattttctgaactattttcagggcgcatgtaatagtttactttcaaaataggagtgaaaaatactttcaaaacaacaggaagcacgggtgaaaacatccaaagtcgacaaaccaacaaaggcaagtggcgaatccggagtttgcttttgattaaaagaatccacgcttagcctgagaaaccgccgaccgatttcgattcaacgcgcttgaatgacttgcaaagcaggccgccaacgagatcgacggcgtctaacgctgtgaaaggccgcgctaacggccttcagcgggtacggtggacgtacggccattggggagacaagcatggtaagttaccatccccagcctccgccgcaacccgcaccgccgccccagccccaaccgcctccccagccagcgccgccacatccccacggacggccccagccacctccccagccccacggacttcctccccagccccactccttcttgtccttcggctcgcctgccgtcggctgcgcgtccgtggcctccgccggtccggttgcggtggcgacgacagtcccgaccttgggagcgtcagccagagctcgaagcgcgggcgattcggcagcaacgacgcccgcggtggcgagcactgctgcgacggcaatggtggtgcacttcatgttgctgcttgggtacttgctagcttggtgtcgaggaggcaagttgcggtatggtgaatgacaccacgggtgcggccgaacgtcggtccaaggggtcagcacacgttggctccgcgcggagatttccgtcgaaatcggcccctttccgcatcaatcaggagatttttcgtcttgcaggcgattcagaggatcgcatgcttcgattaaagttagtcgatgagagtgctacgaattcgagggagtattcgatcggctgggcactctgtagcggtgtttttattgattttgcttaccgttttgtccgtttgtttgtctagagaataaactgctgtgagaattttcgggtgactcattgcttgcacacacaaacaatgtgaatgcataaagtacatgtgcagcatgcgcgtgtatgaagtatggcattcgcctagcgcggagtggttccaaccaaaatagtgaaacccaacattcaggcgctatgttgcgtcgccttcattttctgaactattttcagggcgcatgtaatagtttactttcaaaataggagtgaaaaatactttcaaaacaacaggaagcacgggtgaaacacaaacgagacatccaaagtcgacaaaccaacaaaggcaagtggcgaatccggagtttgcttttgattaaaagaatccacgcttagcctgagaaaccgccgaccgatttcgattcaacgcgcttgaatgacttgcaaagcaggccgccaacgagatcgacggcgtctaacgctgtgaaaggccgcgctaacggccgtcagcgggtagggtggacgtacggccattggggagacaagcatggtaagttaccatccccagcctccgccgcaacccacaccgccgccccannnnnnnnnnnnnnnnnnnnnnnnnnnnnnnnnnnnnnnnnnnnnnnnnnnnnnnnnnnnnnnnnnnnnnnnnnnnnnnnnnnnnnnnnnnnnnnnnnnnnnnnnnnnnnnnnnnnnnnnnnnnnnnnnnnnnnnnnnnnnnnnnnnnnnnnnnnnnnnnnnnnnnnnnnnnnnnnnnnnnnnnnnnnnnnnnnnnnnnnnnnnnnnnnnnnnnnnnnnnnnnnnnnnnnnnnnnnnnnnnnnnnnnnnnnnnnnnnnnnnnnnnnnnnnnnnnnnnnnnnnnnnnnnnnnnnnnnnnnnnnnnnnnnnnnnnnnnnnnnnnnnnnnnnnnnnnnnnnnnnnnnnnnnnnnnnnnnnnnnnnnnnnnnnnnnnnnnnnnnnnnnnnnnnnnnnnnnnnnnnnnnnnnnnnnnnnnnnnnnnnnnnnnnnnnnnnnnnnnnnnnnnnnnnnnnnnnnnnnnnnnnnnnnnnnnnnnnnnnnnnnnnnnnnnnnnnnnnnnnnnnnnnnnnnnnnnnnnnnnnnnnnnnnnnnnnaatagtttactttcaaaataggagtgaaaaatactttcaaaacaacaggaagcacgggtgaaacacaaacgagacatccaaagtcgacaaaccaacaaaggcaagtggcgaatccggagtttgcttttgattaaaagaatccacgcttagcctgagaaaccgccgaccgatttcgattcaacgcgcttgaatgacttgcaaagcaggccgccaacgagatcgacggcgcctaatactgtgggggccgcgctaacggccttcagcgggtagggtggacgtacggccattggggagacaagcatggtaagttaccatccccagcctccgccgcaacccacaccgccgccccagccccaaccgcctccccagccagcgccgccacatccccacggacggccccagccacctccccagccccacggacttcctccccagccccactccttcttgtccttcggctcgcctgccgtcggctgcgcgtccgtggcctccgccggtccggttgcggtggcgacgacagtcccgaccttgggagcgtcagccagagctcgaagcgcgggcgattcggcagcaacgacgcccgcggtggcgagcactgctgcgacggcaatggtggtgcacttcatgttgctgcttgggtacttgctagcttggtgtcgaggaggcaagttgcggtatggtgaatgacaccacgggtgcggccgaacgtcggtccaaggcgtcagcacacgttggctccgcgcggagatttccgtcgaaatcggcccctttccgcatcaatcaggagatttttcgtcttgcaggcgattcagaggatcgcatgcttcgattaaagttagtcgatgagagtgctacgaattcgagggagtattcgatcggctgggcactctgtagcggtgtttttattgattttgcttaccgttttgtccgtttgtttgtctagagaataaactgctgtgagaattttcgggtgactcattgcttgcacacacaaacaatgtgaatgcgtacagtacatgtgcagcatgcgcgtgtatgaagtatggcattcgcctagcgcggagtggttccaaccaaaatagtgaaacccaacattcaggcgctatgttgcgtcgccttcattttctgaactattttcagggcgcatgtaatagtttactttcaaaataggagtgaaaaatactttcaaaacaacaggaagcacgggtgaaacacaaacgagacatccaaagtcgacaaaccaacaaaggcaagtggcgaatccggagtttgcttttgattaaaagaatccacgcttagcctgagaaaccgccgaccgatttcgattcaacgcgcttgaatgacttgcaaagcaggccgccaacgagatcgacggcgtctaacgctgtgaaaggccgcgctaacggccttcagcgggtagggtggacgtacggccattggggagacaagcatggtaagttaccatccccagcctccgccgcaacccacaccgccgccccagccccaaccgcctccccagccagcgccgccacatccccacggacggccccagccacctccccagccccacggacttcctccccagccccactccttcttgtccttcggctcgcctgccgtcggctgcgcgtccgtggcctccgccggtccggttgcggtggcgacgacagtcccgaccttgggagcgtcagccagagctcgaagcgcgggcgattcggcagcaacgacgcccgcggtggcgagcactgctgcgacggcaatggtggtgcacttcatgttgctgcttgggtacttgctagcttggtgtcgaggaggcaagttgcggtatggtgaatgacaccacgggtgcggccgaacgtcggtccaaggggtcagcacacgttggctccgcgcggagatttccgtcgaaatcggcccctttccgcatcaatcaggagatttttcgtcttgcaggcgattcagaggatcgcatgcttcgattaaagttagtcgatgagagtgctacgaattcgagggagtattcgatcggctgggcactctgtagcggtgtttttattggttttgcttaccgttttgtccgtttgtttgtctagagaataaactgctgtgagaattttcgggtgactcattgcttgcacacacaaacaatgtgaatgcataaagtacatgtgcagcatgcgcgtgtatgaagtatggcattcgcctagcgcggagtggttccaaccaaaatagtgaaacccaacattcaggcgctatgttgcgtcgccttcattttctgaactattttcagggcgcatgtaatagtttactttcaaaataggagtgaaaaatactttcaaaacaacaggaagcacgggtgaaacacaaacgagacatccaaagtcgacaagccaacaaaggcaagtggcgaatccggagtttgcttttgattaaaagaatccacgcttagcctgagaaaccgccgaccgatttcgattcaacgcgcttgaatgacttgcaaagcaggccgccaacgagatcgacggcgtctaacgctgtgaaaggccgcgctaacggccttcagcgggtacggtggacgtacggccattggggagacaagcatggtaagttaccatccccagcctccgccgcaacccacaccgccgccccagccccaaccgcctccccagccagcgccgccacatccccacggacggccccagccacctccccagccccacggacttcctccccagccccactccttcttgtccttcggctcgcctgccgtcggctgcgcgtccgtggcctccgccggtccggttgcggtggcgacgacagtcccgaccttgggagcgtcagccagagctcgaagcgcgggcgattcggcagcaacgacgcccgcggtggcgagcactgctgcgacggcaatggtggtgcacttcatgttgctgcttgggtacttgctagcttggtgtcgaggaggcaagttgcggtatggtgaatgacaccacgggtgcggccgaacgtcggtccaaggggtcagcacacgttggctccgcgcggagatttccgtcgaaatcggcccctttccgcatccatcaggagatttttcgtcttgcaggcgattcagaggatcacatgcttcgattaaagttagtcgatgagagtgctacgaattcgagggagtattcgatcggctgggcactctgtagcggtgtttttattgattttgcttaccgttttgtccgtttgtttgtctagagaataaactgctgtgagaattttcgggtgactcattgcttgcacacacaaacaatgtgaatgcataaagtacatgtgcagcatgcgcgtgtatgaagtatggcattcgcctagcgcggagtggttccaaccaaaatagtgaaacccaacattcaggcgctatgttgcgtcgccttcattttctgaactattttcagggcgcatgtaatagtttactttcaaaataggagtgaaaaatactttcaaaacaacaggaagcacgggtgaaacacaaacgagacatccaaagtcgacaaaccaacaaaggcaagtggcgaatccggagtttgcttttgattaaaagaatccacgcttagcctgagaaaccgccgaccgatttcgattcaacgcgcttgaatgacttgcaaagcaggccgccaacgagatcgacggcgtctaacgctgtgaaaggccgcgctaacggccttcagcgggtacggtggacgtacggccattggggagacaagcatggtaagttaccatccccagcctccgccgcaacccgcacnnnnnnnnnnnnnnnnnnnnnnnnnnnnnnnnnnnnnnnnnnnnnnnnnnnnnnnnnnnnnnnnnnnnnnnnnnnnnnnnnnnnnnnnnnnnnnnnnnnnnnnnnnnnnnnnnnnnnnnnnnnnnnnnnnnnnnnnnnnnnnnnnnnnnnnnnnnnnnnnnnnnnnnnnnnnnnnnnnnnnnnnnnnnnnnnnnnnnnnnnnnnnnnnnnnnnnnnnnnnnnnnnnnnnnnnnnnnnnnnnnnnnnnnnnnnnnnnnnnnnnnnnnnnnnnnnnnnnnnnnnnnnnnnnnnnnnnnnnnnnnnnnnnnnnnnnnnnnnnnnnnnnnnnnnnnnnnnnnnnnnnnnnnnnnnnnnnnnnnnnnnnnnnnnnnnnnnnnnnnnnnnnnnnnnnnnnnnnnnnnnnnnnnnnnnnnnnnnnnnnnnnnnnnnnnnnnnnnnnnnnnnnnnnnnnnnnnnnnnnnnnnnnnnnnnnnnnnnnnnnnnnnnnnnnnnnnattgattttgcttaccgttttgtccgtttgtttgtctagagaataaactgctgtgagaattttcgggtgactcattgcttgcacacacaaacaatgtgaatgcataaagtacatgtgcagcatgcgcgtgtatgaagtatggcattcgcctagcgcggagtggttccaaccaaaatagtgaaacccaacattcaggcgctatgttgcgtcgccttcattttctgaactattttcagggcgcatgtaatagtttactttcaaaataggagtgaaaaatactttcaaaacaacaggaaccacgggtgaaacacaaacgagacatccaaagtcgacaaaccaacaaaggcaagtggcgaatccggagtttgcttttgattaaaagaatccacgcttagcctgagaaaccgccgaccgatttcgattcaacgcgcttgaatgacttgcaaagcaggccgccaacgagatcgacggcgtctaacgctgtgaaaggccgcgctaacggccttcagcgggtagggtggacgtacggccattggggagacaagcatggtaagttaccatccccagcctccgccgcaacccacaccgccgccccagccccaaccgcctccccagccagcgccgccacatccccacggacggccccagccacctccccagccccacggacttcctccccagccccactccttcttgtccttcggctcgcctgccgtcggctgcgcgtccgtggcctccgccggtccggttgcggaggcgacgacagtcccgaccttgggagcgtcagccagagctcgaagcgcgggcgattcggcagcaacgacgcccgcggtggcgagcactgctgcgacggcaatggtggtgcacttcatgttgctgcttgggtacttgctagcttggtgtcgaggaggcaagttgcggtatggtgaatgacaccacgggtgcggccgaacgtcggtccaaggggtcagcacacgttggctccgcgcggagatttccgtcgaaatcggcccctttccgcatcaatcaggagatttttcgtcttgcaggcgattcagaggatcgcatgcttcgattaaagttagtcgatgagagtgctacgaattcgagggagtattcgatcggctgggcactctgtagcggtgtttttattgattttgcttaccgttttgtccgtttgtttgtctagagaataaactgctgtgagaattttcgggtgactcattgcttgcacacacaaacaatgtgaatgcataaagtacatgtgcagcatgcgcgtgtatgaagtatggcattcgcctagcgcggagtggttccaaccaaaatagtgaaacccaacattcaggcgctatgttgcgtcgccttcattttctgaactattttcagggcgtatgtaatagtttactttcaaaataggagtgaaaaatactttcaaaacaacaggaagcacgggtgaaacacaaacgagacatccaaagtcgacaaaccaacaaaggcaagtggcgaatccggagtttgcttttgattaaaagaatccacgcttagcctgagaaaccgccgaccgatttcgattcaacgcgcttgaatgacttgcaaagcaggccgccaacgagatcgacggcgtctaacgctgtgaaaggccgcgctaacggccttcagcgggtacggtggacgtacggccattggggagacaagcatggtaagttaccatccccagcctccgccgcaacccgcaccgccgccccagccccaaccgcctccccagccagcgccgccacatccccacggacggccccagccacctccccagccccacggacttcctccccagccccactccttcttgtccttcggctcgcctgccgtcggctgcgcgtccgtggcctccgccggtccggttgcggtggcgacgacagtcccgaccttgggagcgtcagccagagctcgaagcgcgggcgattcggcagcaacgacgcccgcggtggcgagcactgctgcgacggcaatggtggtgcacttcatgttgctgcttgggtacttgctagcttggtgtcgaggaggcaagttgcggtatggtgaatgacaccacgggtgcggccgaacgtcggtccaaggggtcagcacacgttggctccgcgcggagatttccgtcgaaatcggcccctttccgcatccatcaggagatttctcgccttgctggtattcgagggagtattcgatcggttgggtaataccctggacccgtattttattcattttgtttactgttttcttaacaacaacaacaaccatatcttggtgatggaatatcgaatactccttcgaattcgtagcgacgagcagggtgcagcacgatcaagcgcgatcctcagtatttatctgagttgccgagaaaatccctggttggtgcggaaaggagccgattccgacggaaatctccgcggagccggcgatactttacggcggtgatccgacaattgtctgtgaaactggggtgtcgaatataatatagtaacacagactgtgctacggtcgatcgcttaagaagcgaaaaaaaaagcgaaaacaaaaaagcgattcgcttgtattctagctctctttttttattatcgggacgttcatgccgtacataccgtagtgtacatcaaagtcgaaagacgcagcgcaaaatattgcgacgaaactcgagtccgcacagctgaaaatgtggttaagcagagaaaaatttgtcgacgacgtgtacaagctgctgaagctggattaccccaatgtgccattttacgagaatctggcactcaacacgtgggttgcgtacatgaatgctttcgtgaaggagaaccccgacaagatatctacgatgctgtcgacattggggtctcaacttaacgaaagaaagctgaatcaggtcctcttagtggcacaaaagtaccccagtatgaaaagcgccgccactaaaatccagacggagaagatcctgagatatctcgcgagtaaccaatcccccaaggaaatcttcacgctgctaggacttgaccacgctggggacacaatcctcaggaaccccttattcaagtcgtggatgaattacgtgaaggacttcaacaagaagaacccaaagcaccaagagtcctgggcagagccacttcgtacacactatcaatggtatggcacccaaaaattggtcgggagggcgatgcaaagccccagcaccgtcaaaactgcgaagctggcggagaaaaagttgctcaagctggcactagaccaggaagaaccccccacaaacgtgttcaagttcatgtacctcgacgaagctggtgggcagactacgagtttaaggagtgggtcaagtacctgaatgacttcaaccgacgatatccagaccaaaacgtgtcgatagtcgatggactgaggaagagttacaacgacaaggctctcctgaagatgttcaatgcggcaaagaagaaccccagtacggcgaaactggtggacaacctgcaaggcgcgcttatcaacaagtggttagctctaaagaagcagccagaagacctgaaagtgtttctttctaatgtggcactcgccgatgccatgatagcgcggtataccaagaagttcgatgctacacatgcatcgtaacctcaccttgaacggagactttaggccaatatacagccagaaaattgtcgaccaaaatctggcatttgcagggcgtgcttgaacgatatggtgtacggatatattgagatacgtttatccaaatgatgtccctattctccaggtttactacactgtcgctgcctcggcaagtcgaagtttggtgatggtctcttcattggagttccagtatttgttaaacttcctccaacagcgaaacagtgggtcgtctgtcagctgctccatcgtgtatgtcgcttcgtggagatctccagacgctcgtgcagcatcaccgggtcaattttcatatcgactgcaatctgctcgaacagctttttcaggtggcccttttgggcggcgtatagattttcaagaaacacgagctcgtcgatggcggagaacgagttgctcctggtcagcttgagcgctaagttcttcgtgcgcgtcggcaaaagcgaaagcacgttctcgatggtactgccgaactgccggccttcgtcttccgagtcatcgccagtgacttgctcggtggctcttaagaaacgatcgatgctgtcaactgcgcctgaggtcaccatcttgggtacatgagggtggttcgctgtggacatcgcatcggggcttcgaaacagcatcgctgcagcgatgagcacacaagccaacgcattgcggctagatagaagacactatgcgttgttggcagctaattgcggagtgggaggctatatattgagtgagtctgctctcgtggctgtgggacgtcgatgtgtcttgcagctgcacctcctgttaattcacggcccggccggtaacttgcaaaccgaatacattggtctggtttgttgcttcacaggcgtacatgtacgcggacgctgaaacagtcctgtacctgaatacaaggtattaataccgtaatgcacgcttgcatgatgttttactctagcgctagacattgacgtgacgctcctttcaagatcttgagatcgtgaaattgtcatacaaggtgatgtgatgctacccagtatcatggtaggtaaatactatacacattgtgatgtacagtgtatgcaatgccaccaggtttttcttccaaacgcatccaatggccaatcatcaatggcagttgcaggatcggcctgctccttggctaattggtctcacttgcacttcgctttaatcgccaaacgtgaccaaaacaacacaattgaagtaaacatgcgcttccagtgcattgtgctgatagccctcgcgttcttttacgttggaatcgacactgcggacgccctgatccgtgctgaacaagctgtcccctcgaagaccaccggtcacaattgtctgtccagctcaacaaacacgggaaggctgctacgtgctgaaattggggatgacggtggagaagagagattgccaaacagcgagtgggtgtccagactggcgcaagcggaccgaaaagtaccgaagctgcggaagcttgacatgaagctgtcccagtggttatggatcagagacggcaaaaccccggaggaattgttctatacattcagcaatctctacaacacatgggcgaagatcgagagcaacaagaaaaccgtccaatggttccggtttgtcgaggcgtatcgagccaagtggggaacaggccgttttgtcgatcaagatatctaccgcttgctctctacaaaagtgcgggaggacaagttggcgatcgtgtttgagactgacgcaaatcccggacgtgaaaactccgagacgatgcagaactcccagtttaggctgtggatctcccgaaaagaaaccccgaccagtgttgcggccatactccacatgccggacatcactcctttgacagccgagcgcggtcccaaagatgcgattctgagcgcttttacgactatgctgaaaaagctggaaggacgctgaacgaggaacgagcaagttggctagaagggcttatgcatgcgataatgaacctttttcagaaacgaatgctagtagcaaccagggataaccagttcatcagtatcaaccccttcctttatcaggaacgaaacacgagcgacggttcactcgaacgactttatagaagtgctttcctgagttttttttagttaatttactgctttccatttctcatagtgcatgagcaaggtttcgaatagagtagcgcactagatccaaatacacgttgaggaatgggctacgagtccatattaagtatatgaagttcctggtcagcttccgtgctaagttcttagtacgcattgagaaaagcgtaaaacgttctcaatgaagctgccaaactgtcgtttttctttcgtctggttcatcaccaccttggttcatgtgagccagatcctgctgtcgaccgacttacaccgtctgcgatcgccatctttgggaacagttttgtttgtttttgaattgagggatcagctaacaactaaatctttggaaacagtggagttccccttgtcgatacagcgtcggaggttgggaacagcattgccgcagcaatggctgcgcgtattagatcaattgggtgctacttaattgtgagactcacaatttgtgagtacccaagtacttctacatccggcatggtcaccttggacgagaccggaggaaggcacaatatgaatgtatctgggggagcaacgcatcgaacctcttatgccgacgtgagcaagccaatagatcattcaagcgtcatctagcagaaaacaaaagaaaagttgtcctaaagggggtttgtagcacgttatttgcgttcgtgaatgccatcccaacaaacaacatctttagagtagagacagtagttgcaagttgacgctagcgcacgagttcaaatgaagtctatgcactcgaaagtcggcgcaatgtactcgaaagtaaggacgacccagatcaattatggttcagaacagaacagtcttattggtctattccaccataaaatgactatctgatccaccgctgtgctgggagcaagttctacacattagatgcaagatcggcttctagcctcctagcatcgagggaagttggtctacagcgacggcttttcaccggatcacatcgtcggcctagattctcgtccagtacactcccaccgagtcaagctccttgccactggttccgaagaagccgcccaactggaagcccgcgggtgcgctttcgatcccgatcttagtcgcgcgagtgcctccagagatggtgtggttcgcgttggtggtgaaccggatgaatcggacgcgcgtgtggctgtggcactcgccccagtgagcttcgatccccgtgacgttctcgccctcgcccatcgtgagcgtgttcgagtcgccgccaccgccgccgtggtacaagggctcctgtccctcaatttcgataccaacgccgttcacgcgctcgccggtgcggatcgtgatggccttgaccacttgtcccggggacaccaacgctttgtcgtcgtacttcttgccatgtgggccgccgaaggtcgtgctcagtcgaatgccgtcttcgacggcggtaacgctggtcgcgatgagagccgccgccacggagctgggagatgaacttcatgcttgtcgaggattattgttggaaggactcaaaattggaaatgaactgaagcttttcgcgcttatcagtagaatctgccccctgaagctctcggaaacacaggcggagctctaggttgggatacaagataggatatgttgattggtgagctgcgattaaaacagagaaaaacgcggaccattggaaacgatatcgatgactggattaccagcctgagcagctccttgtgccgacttaaggattatgggttttagtgttcgccttgtttaattcgaactattgtagcctgaaatcgtatctcgcgcatggtttgttctttcatgcctgtgcagtacttacaaacaaacgttgcaacagtgtacagttccggtagataactgaatacaatgccccgtaatgcatgttggcgtgatcccttaccagtacagttcgtgtactttagtaccaaacgttgacgtgatgcttctttcaaaatcttgagatggtgaattggtcatacaaggtgatgtgatgctaggtaaaacacaaggtatacgttgctgtatgtagcggatccagaaccaagtgttgtgccgtcgcaacagtataagaggaaggtagcatagtgttcattacaatctagcagcagctcatgcggtcaatcatttcgtggttgctgcctgtgtcaccgacaaccgcaatacagtgcagctctaccgaatgcgtaccccggatatcgatctatcgatctcgggtattatttatacagatcataccgcgtggtactgaatatcctgtttcccgtgctcgatctcggtgtgttatgctggcttctatgcaatatacgtcaccatgatgcttgcatggtggaaaacaggagatatatataataacctgctgtacagtaatatgcacagcattcaatctcttccgaaagttaccctgttgtattgcctcacaaatcacaagaactctaaacagttgatcatgtggaaggatgcagttttttttttcacgctgaggcagctaaacggttctcaatgtgtccgcacttttcgttctccttccacaaacaacagtaccccaaggcatcatgcagacttggatggagttcgcgacacttgccaccctaactctggcagcagaagcagcattccaaggcagttcccaggatctatcgtcgctgtcaacacccggcgtacttcccctccctgaaactccaagtcgctctcaagcacaagaccacgaagatccacggggcattcgagttcgacatgtacgccaaaccatcgtgtcggacgatggcagcagcttacgctacgacggctaccccacttttcccgaagacagcacgcaattcacctattcactcgtgggactacagaagacgaacgcactggcattgaagccgtccagtgtcttccaccggggacgctgtcgttcgatgatatcttacctgcgctaaacgacgcggagccggtctccagagcctcagtaggcggcgaaggtgtcgagtgtcggagtgggaatttgttcagaacttcctttggcgacgctgccttcgctgtttgcgcgtcgggtgcatctggtttcactgtcactggcgtcgatttcaccatgaaggccgagtatctggatggacctgtaaggattacggcacccaagcccaccgatgggtcctcgtcgtgtgatgtcgtagaggagcctatggaagtgacgccaatagcacttgcggtactcaccggtagcgctgttccttctgcttctccaaggaagctgaaggcatctgccccgctcgtatagtgcgacatggtagtacaagtagactgtagggctacacaccctcccatgaacaacttcgtcgacatagggaacccattatgaaatttcgacatcgtctccgcgcgcctagaacagtagctaacccatcgcaccacagctcagcactcgagcttgacacttcaacatgagacggcccccatcgcgtaatgtaagtcacgaaaaggtatttctcacgaatatgcggcaccgcgcgttgttatccattccaggctcggtacccggtaggcctcctcggcggaaacgtctccagctgccgagtgcgcctcaactgcgtcaggccgccgacattgtggggtcagagaagagcaaagacttatgagagcagcctaccatcgccactgatgaccctgaatcctgctctagtgctagaggccaggggcggcctcgacccagtattgttcggggacagctaccttgaccgattctacgcggccaagctgaaccatgcagataccgcgttcctgactcgggacggattcttcaaagacccccagaagcctttcaagtggttcgagtgtttgctgtaggggaccgtaaaagcctagacactccaaccagtcgaaaacacaaaaacacgtttgatccacgccgatcttgacaccaacatcaaactgctgtagtcctgtcgaagccgcaccacatccagcaacaatggcaacataactcaaaaagtaaaacccgcgaatcgtttcacaagaactcaactaaatgctgcagctcgactgtctctgcgtccatcctggctcctaaatggtcttgatctgcgccatcggcgccttgtatccggcgcccatggccgtgtacacggccccgctcgagccccctccgtagacgttctccgccgggggcgggttcctcatgagctccgccctgtacgcgtgcgagcgctggatggccacgtacgtgacgaagagctgcacgccgaaggacagcgtgccgaagatgacgacgccccaggcccaggcgtcgaagtccttccactcgctcacgaggatgaagagcacgacggccgaaatggcctgcagcagcagcatgaagcagttgccgaagtagtactggacagcaacagacagcagagagaagagaaggcgttaggcaacgtccaggtaaagaaggcatggctaaggggatagctagctgcagcacgtacgaactggatgaagctgactttgctctggatgacgggctgcacggagccatagtagcccatggcggccacgatgacgccgaagaggcccgaccaccacacggtgtacgtgaagaagaaggacacgagcgtcacacccagctgcagcagcgcgatggcgttgcacgggtcgcggttctcgtacaggaagccgaactggtcgttgcgctcgaggtccgccatctgtgctgcgtcttggggccgggctgtaactagcgagggagctgacactgagctttttagctgctggaggtgctgggggggggagcgctggtgctggtcctctcgtagaaggccgaatgagtgattcgctttccagcgactggatcgcgtcgtttcacaagaagatacgtacttccaggaagccataaaatatggttaatttgtggtccacaccgtaacagagctcttcggtttggcttcccggtagatactggacgactattgtgacgtcttgaccaggacgactatgaaccaagatgacttccggcagatgctcgcgagccgcgaggcggagggcgaacagcgcggctacgggggcaagcgcaatctgacagacgcggaccttgcggaggcgaggaagctgtccgcgaagaaagccaagaagaagggcaagaagccgaagagtgcaacgcccgcggacgccggcgacgccgagcatgagaagcctaagagttcgtaccgagaccgcgcggccgagcgacgcagaggagggacaggagacatgatcgacgccgacgagtacaaacatttgaacacagagcagagcaagttcctgggcggagacatggagcacacccaccttgtcaaggggctggactacacgctgctggctcagctgaagagggaaaaggagaagctcctggcggagaaggagaagcaggctcaagtacaagccggagataatgatagtactggacaggtagtgacgacacggccacgagatggcaagctcacgttcaagtcgaggatggggaggctcgtgtacttccacgcgtgtcagagcacgccagaggccacgacgtcagtgaagtcggagctgttcctgcccggcaggatgtactacacgtttaacctgtcgactgcagagatcgagagcgtccctgtgagtgtgcagaggagtaaagatgactgcccggaacctgatgaggtggtgagcggcattgtggacgaggcgcttgtggacagagtcaaggagttgatgaccagcaagaagagcgggaagaagatgcgtaagaagaaaaaggagaaccatcaccaccatgcagataaaggtcagaacgatggagaagaggacgagaacgcagcggacgcagacgtgccgatggaggaggtcgcagttgaagctcctgctgacgacgaggacgaagatatcttctctgacgtgggcgagtacgtcccgatcgatcagcgcacggatgagtcgtctgccgatgctaggaagaaggaggagatcaagaaggcgggatacttctcgaacctcagtgcctccatcactgagaaagaggaggaggctcgaagaaaggaaaaggacgccgagcgtgcttggaaggagacgctgcagaaggctgttgacgcgcagaagcggatcgagcgcgagaaggagcggaaggcaaaggaggccaagatgaccggccagacggacgactatgccgagtaccaggccattggcgccctgccagatagcgacgacgaggacgacgaggagacagctcggcgccgcaaggccgcaggactcacggaccgcaagggcgacgttgacccggaggagaaggctcgacggaagcagcagaagcagagcagcaagctcgcgaacgatctcgagaagatcaacaaggtaagggctggtgtcatggtgaagtggacatctgactcactattaataacgcgtaccgtaccctgtgtggttaacagatcatggaggaaaagtctaaaaactaatagaaatcagttctggcagaatcttctcacccttactattggcttaaatcaatatccaatttcctccaatgacaccgctgtattctatccattggttgagagcgccgcctgcgagcgaaacgcagacaccctcgggcgtcgccgtgggcatcatttttgcctggtcttccagttttctactgcaaaggtgcgttctcgcttctgcatcacgcacaggcctctctctatctacaggacgcaggaaggacgaggggacgagcatacacaacagcttagcacggcgatgcatcagccagatggatgcagggatctctgctctgtggatgtcgccgcccctcgtccatccgtgtcataagggggaggatattagtgcccaacagtcaatgggagactgacctctgtgtgtgtgtggcttgattcccgacagaaaatggctgacgctattgctctcgctcgtgaacgcctcgcggccaagttcggtgacgtccgtacgggcggcaagggcacggtgcgccgaaagcgcaaggccgcccacaagacggccacggcggacgacaagaagctcggcgccaccctcaagaagctgggcgtgacccccatccccggcgtggaggaggtgaacctcttcaaggccgacggccaggtcatccacttccaggcccccaaggtgcaggcctcgatcgcgtctaacacgtacgccgtgagcggcttcaaccagaccaagtcgctgcaggagctgctgccgggcattatcaaccagctgggcccggacaacctcgccaacctgaagcagatcgccgagtcgtacacggccgctcagaaggccgccaaggccgcgtcagccgccgccgctgacgacgacgacgacgaggtcccggaccttgtggacaacttcgaggacgttagccagcaggactaagaaacgcgcgacgagcgcggcagcctgcatccatggagaggggacgatgacccagtgaggagtaaatgacgagcgaatggcccagcatgtctgcgtttgttggatgtctgtctccgtatccgcacgacagttcccgtcgtgggttgtcgccttcttagccgctcgaggatgcaggtcgccgctgtccgccgacgccgcctttggtgtcctataggtttcgcatcaaggagcgtaatttcttaagagaatcccagtactactagtacgccaggcataacatcagtgcagttgtggagtagccgtgtgtgttcattgcttgcgtctggagagagggttaacgcacttgcacgcgacagacttggctccgagagttgcattgttgcaatggcagcagcattgcatgcaggctgcgtgcacctcgcatccaacgccgaaagaatcagtcaccaacactgaagctgcggcggtcaaaggcctcctcctctccattctgcagtcgtcactaggcggcggttatctacactgtcttccctccttcttctccgctttatccgccactcagcgccgcacagcagaccagaacgcccctcaccgccgaataactaggcgcctaagttactccttgagggtcacgatggccttcttccagtccttctccttgtacacgtagcggccgcggaacgcgcgcttaaacttgcctaccaaacaataatacacacatagagtaagagacctgaacaatagcccacatatagcccctgtagactgcagacgcaccctcgtagttcatggtgttgaccttggccacgggcaggtcgtagaccttggtcaggtactccttgatctcgtgcttggtgtagtgcggctccacgcggaagacgaactggttgtcgcgcagccgcgtgcgcgcgttcttgcccatgaaggtcaccgccatgttggggaacttgacgcggttccacaccatcttgccagcctgctgcagagtctcaatgtatgtatggggcggagagctgagcgcgctgtggctcacagccgctgcttttccaccaatcccagcggcacaaggcccttttcaaccaattaaaacacgtcgcaatattcgaccaatcgggacgactattgccactttgcaaaggagctcacaagacaacatggcgcgggcgggcaagtgcttcgagtgcgtgctgcagggcgaagtggtgcgtctgacggcgtctaggcgatgtgctattgataacaaggtaatgctgtttgcgtatactaattttaacgggtattggtgctgtggtggtggtgatatggcggctagaacttcaaacacttcccctccttcgtcgagcgcctcggagggctgtgcgacgagagcgtcgtcaaggtaaatcgactgcagaatacggctattgtgttcatttagtagtgattgtgtatttctgggtggttatgggcaggaggacattgcgtacaaggagtacgtgtacaacttcgacgacaagtgtccgcagtacatccagggcgtgccgcactatgaagtgcgagcgcgtcacgtgttttccggctccacgacattccagggagaagcggtggagatgccctcggatggaggacagaagtggtgagagattgctatgcggcaaaggcttgaaccacggtgtaattactgacactcttgctgtcgcagggagctgcgatacattgggcggtgggagcgtaagaagatgtcggagcatgttgggagtgcgccattgggcgtgccgttccgcagtcagatcgccgtctcggttggacagaacgtgcgatctttcctcggcacgctcggcttccggtaagatgaccggtgtttgttgctgtgctctaaattgaagctgacgtgatgccacttgctacagccacagctacaggtacatgagacttggcacgcgatggcaattcccgaatggtatcacgattgaagctacgcgcatgaaggcggtaagtggtatactagtactgctcgaggaaccaattcagtttagagctaatgtgtggctgttgtgaccgtacatagttggaaaatgaggacgagaaggacgagtatcgtctggtggatctggaaaatctgcgtgtggaggctctgctcgtggagatctccgctctgacgacggacgagaagatcgacgaggcctcgcagaagattcgccgttttgcagttgacctggacccgtacttcatcgagcgtccgtccgagggcaaggagattctgcacagcactgctactctggctgctgagcgccgcaaacgcccgcgtcagtagagcgactgcccgaataaaagtgaagcgacgaaatgaccgtaacacagctgagtgtcacgaagaatttcaatctgaatcggtttacggaataaaaatgaggttggttagtgcggagtgctttggtgtcgctgtgacttccttgggtcttgggcactaaattgtctctatcagtcgtgtcttggggctgatgcatctgggaaaatcgtgcacgactgggtagaacgcttggcgctgtctctaattgcaatcacaggcgaagccttgttgcttgacagctctgtacttcggaggtggcgtctgggaaagtcggataatctccggtggtgcaggctcttcctcctcttttttgtcgtcacccgcttgctgcttctccttctccacctccttctcagctctgaggtccaccaccatgcggtcaattagacactgaaacgcgtcgccaatgtgctcgccgctcttggccgatgcgcggaaccactcaacgatcttgttcttgtccacgcacttctgcatgttgacacccagatccagcgcgcccatggggtccatcagcaggtcgctcttgttcgcgaccatcaccacggggatctccgccccttcgttcaggtctttgcagcacgtgtcgatctcgttcttccagttcacaaccgcgtcaattgtattggcgcgcgtgatatcgcacacgatcacagcgcccttcgcctcgcggaagtagccgcgcgtgaacttggcaaaccggtcttggcccgcgatatcccacagctgcaagctgatggtcaagtgctcatcatactcgataatcttctccacaaagtccgccccaatggtgctcacgtactcctcgttgaactcgtcctgcgtgaatctgcggatggtgctggtcttgccacagcgagcgttgcccacgatgagcactttcatgatcacagtctccggctcgtcgtccgaggacgagtcgaagctctcgccgatctccgagccgctgctgctcgatccactcgagaactgggcgagcatggcctcgatctcctccttggtcggggctggggcgttcttcagctctgcgagttgctgctgcacctcctcaagactcagcgaggccgtcatcgacctcgagcgctcgctgcgagccgccaatgggtgggaggaattggagtgattgctgtggacactgtgcgtgtcgttagcctcctcgaagtccgtcagcgtgcgcgcctccgagtcgttgtcgacgctgccgacgctgctgcggtgctgctgcaagatgcgcgccgactgcttggagctgaacatggccgctacgtcgccgtagtccatagctcggtccgaatctattgtgttctcgacgagagggttctcgagagcgacagacttgggacgaggcttccgtactgagttgtcctggaagagccacaatataactgagctcttcaacttcggttgcaaaagtatctacttcctgattggcttaaaataaaactcagggattggtcctaaaccgacaagtatttaaccaatcagaaagtcttgtctttgcgagactttcttaaatgaaagtttcattgcgatcgctgcaatcctgtgatcggctggtaaggggtgtaaagttatccttgttacagattaatgacttctcgataagcaaccaaagttctgactatggagctaagaaagacgtaaggtatgggtgacgtccaagcttaaagtgtcggaagcgctgggtggcgcttgaagagcttcctcggcgtttgtgttgaaagcgcgccttcgtatagcaaacagacgagggtgggccgtgacaaaacggtgcagtcatgacgaagctgggaacccgtgcaaacactcttggagccgctggcaggtagcatcttcggaagaacggagtaaagaacggaaatgggcgctgaaaattgcatacacgcgataggtagctgtggatgcttggagtggaggatgaccctcgcattgatgattgttgcgtgcagtccagataacatgaatcgcgatacttttaaggatcatccagagaattgatagttcgtggccatggagatgagcccgcgcgggccaagtcggcgcagtcgggagccacacgtggtcccaggaaatagtgtcgatgagtgcactccagtccttggtgacgaattgacacaagggagtaacgtggtgacagtcgaaaaacaagtggtgttcagtctcaactgacgaacacccaggatacccgcaattcaacgcgtcggaagataaacgctgcaaaaaccagaagcgtgaacgtgttggaaggagtatccaagtgaggcgaaattgaaggtcagcgtacaccggaaggacaacgcgtctgagatctttaagtgagtgaatggcgcgaaccagtgtatcgtgaaccgcgcctgcgcaatggtgctcaatgggatggtccctcattgccactgtcgcggtgcccagcattcggcgtaaatcacgcttcgtcaagcagggaaatctgttaatcaaatcggtctgtgcaagtccaaccggcgcagccatatccgtgacgcgagcggggccgaacggaacctcaccaggaccgacgatcgctgtgacgagcacactcaaatcttgatagagtagttggagttgctgcacacgtattcgcaggggccactagggaaggatcaacacgaaacgactgagaaactgtgggcctgtaggccacgttttggaaaaaaatccatatggcaccgacaacccgtagctgccgcaaaagcaagccgaaaatctctcgatctcctgcttcactcattagtgagctccgtttgcctggttgccactcgagttgaagttggggatgggcactgtgccacacatcggcgtgcagtaaagctgtttggagagagccgtcgttgccctgcactgttgaccggaggtgagacagggatgcgtaaatgtaccaggatctttgccaccacgtcggaatctccataaaaggtaatacttgtagccgccgcgagaatgggcatccgaggaagtcaaatggcgaaagttgtagttcacgtgggagtatagtatccagaacagcggtactggtccctttccaaagctcggccggcgacatccaataacgctgctgaaataagagcactcgctgagttgaaattgtagtcgtaagactaggaatctgcagcctaccgctggtaaaggacacatggtagatactaggttttgctagcttgacgaaccgccggctgacctctcctcgtcgcgtgaggaggtattgctcgactaacgcttgaagccgctgaatcatggccgcggagagatcgaaatgcggtgtaaagtgccacaatacagaaaggaccattgcgtccaaaatcagaagccgccccccgatacgtacgcgctcgggtaccccatcgagacaatcgagcgcagaccttagcctccagagagccacagaccgcgtcagcatgatgatcggcttgcttacattcgaacttggtcatgggttcaccgtgatcgcggggtgacgaatgtatacaaaaccccaatgcaaaatactgcgcctgacatggcaatcccgagacacacttgatctccagcacatacggctgcgctgtcggtacagtaggcagtccgctcatttctgaattccctcaggtcgatcgatgagcctccgtctcttgcgagttttgacgagcctcatcgtcatcgcgcactttgcgtcggtgacaggctccgcagccctcgtgtccaacgtttccagctgggctggtgccgattatgtgagcgaaactggtatcgatgcaaccagatttctgagagtcagcggcgtcggtggtgacggcggcgaggagagggcgggcccgactgcccctatcgtcgagaaggtccagaccttggtcacggcttcgaatgcagcgccggaaaagctccagaaactgctcaacgccgaaaactccgctgatgacgctttcaccctcttgaatctcgacaaggttggagacgcgttgttctctatcgggaattacaagaagctcactcagtggctctcatccggcgacgacttgagtgcaaaaagtcccgcggtaggaacgtccgcgatctcgactctacttacgcactacgatgacgctaccctgtacaccctgatcaccaaagccaaaaggatttcgagaacgaaggatgtcgccacgaagttgcagactgagtagatgcagccctggttggccgccgcaaaagacccggacgatgcattccgcctgatgaagagtggcgagacgaaagggaatattctcaccaaccgtgaattcgacgtttgggcccaatacgttgacgatttcaacgcaaagtatcctgaccaagcggtgccactggtcccgtcgctcgtgaagctatacaaggatggtggtcctctatttgaaatggcccagacggcgaagaacttgaaaaataccagaagcatcgcagccaaggtgcaggatgagttgattaaggtgtggtggaatatccaggtagccccgaatcttctccgtctggattgcggtagcggccttctccttactgtggaacttcttgacgatcaattggagaatttggttgaaaggttggtccttgaagcgcgactcgaacgtcgacagcaaggtggacgccttgctgggattcgctgtgctgacggtattcacgtatgaaacccacacgccgaaggcagaatgggcagcgatgtcacctactagatgctcagggtctagccgtagccgtttgtacacatcgtccacagatttttcactgctccgccacatttccagttgtgcagactccaatctcgatgcaacgctctgtgttgccttgtttgccttcgctctaagaatcatcttggccacgaggtcatcaccgaatgtccgcgttaacgcttcgaccatcgtcgctctgacgggtttctccgcttcgccgtcgtttacgttgtacgctttaatgtatcgggcacgggcccactgttgactagcgggttcacccaaatcttaccattattttctcaaagaagggagtttttgccaagcccgatcgccaccagaacatcgtccggagtcttcccactgtatgtgctgagaaaatcgaaatactgggtcaggaccttgacgtcgtttgcgtttcctctcgcccttctaagcatccatgtgggggaaaccagagaagttcattccgcggttaaggaggccaatctctggttgtcttgtgtaacagggttacacgcacaagtggctacagtcacttgtaactaacagatacgacgtctgttagaggttcgaaagactttctcgaccttggtgtaggcacaccaaaggctacatacatttacgaccaccacgacgggtggtccatagagacttaggattcctattggctgagagcagcatctcttagccaatgagcgacatgcatagcattggaattcttccaaccagccgttcgcagattcctatcttagaatattacatttagggcctggtcggggaatgatcgtctcagtctcgctcgtctccggtaagcctacccctaaggtgaaccgagccgatgtggtcggttggctggagaccgtcttagttttggagtgtcaagcggctcgactcagcaccgtcacactcgagaactcacagccatggaaggcacccttactactccacctgtgggcggcgctgaagctgaagacgctgctgagagaagcgtaagcggcacggaccccaacgggagcggcgtcgagagagcacccccgtatggtggtggtcgcggggcaggtcgcggtggtcgtggaggacgaggagcttcgaccaggccagctgcatcatggagcgatgatgatgtgatcgagttctttcgcctccgttacgcagagttagctgacaacttcaagaacacgaaggacaccaagcgcatcaaatatgcgtgggccgtcttagcatcaacactctctgttaaccagagcaaagtgttcactgaccagcagtgtcaatctaaggtaaatatctacaatgtgaaaatatatttcggaatgagccactactaagttattaatcatgatgtgcggtgaatattttttaaagatgaagaacatgaagcaaaagtgggcgtctgtgcgggaagcagaaggtcgaactggcaacgacggacccgtgcggcgcccaaatcactactccatcatgaaagactactggggtgatgcgacggggatgaacaaccgaccgcatcttagcacggaggacccggatacaattgctgctgctggtgacgctgcgagagccgacgtcgctgccttcgccacacctgcctcacctccccctcctcaatctccaacgccccgcaccatgtctggctccacggggtcgtctaataagcgacagaagcgcacccagggggagtgtgtggaggcgggtttgagtgcggttgctaaagggtttagcgaagggctagaagctttcggccaaggacttgctacagtccgaaatgggggtgccgaagacatgtgcagcaacagaccgagctgttccgcgagcaaagtgagcgggctcatgcccaaaccgagcaactcttgtcggaaattcaagctcagagcgagcgacttcgagtgcagaatgaagcgattcgagagctactggatttgattcgccgcgaccattaaaatctagctacccacgttttctagactagctcaaaagcttcggtaaaagccaaaatggactcacgttttctccaaccaacatctcttagaacgctcgcagtcatctcagagttgttcccagttacaacaaaatcttcctcttcatcgaagttcacccgcgcgtcatcatcatcttcgaaagaagtgtcatccttcaaacccaacaaaatattgtggagaaccatcgttgcagccacaatatccacagccttctcgacgcatttggtgttaatgcagcagttaacaattctgaagcgacctttccagagtccaaaagcacactcgactgtcatcctagttcgggaatgcagataattgtagcgtagctgcttgcgtgtcaaaccggctccatcattttccatgaacggcgtcatgatagccggactaatagcatatcctgcatatcctaaaaagtgggtccccgttggcaaaaaagtctttgaagttggagcctaaagtagacgcacgccatgtttttttgtcagaccacgagcccggccgaatctccacgctagtaaagtgcattttgtcgtcaacaacagcctgcacatttagcgctgggaacatctttcgacaatagtatccctcaaagtcctcgggcctgttaatctccactagagagccgtctatcgcgcctaccactcctggaattccacctttcgcttggaatttaccatgaactcgggtccattcatgagcatgcagcggaaaatgaacgaacttgcgcagcgaccggcgtaaaaccttgagaaatataccgatcacgtcgatagcccaggacttcgaaattgcaaacgcagccgtagtttctctatagccaccctgcgagccgagaaaaaaaagaaaacaagcaaccttctcctcaaaagagtgctccttcataaatcgatctagctcaaaatctttcagctcctgacgcagaacaccacaaagccgtagaaacgtagcttggctacacctgagattctgtcgaaaccactcgtcgtagaccgcgtcgtaaagcatagcctcaaactctagcggtgtcagggtaaggatgttctgctttgggatcgaaattgcccacacagcggtgtggaccgccgtcgcgagagctcctgtggccgcagcaactgcagcaactgcagcaacgatgctttcgctctgcaccatcgaaacgcagtgaagacgctcgtctgcaaagtgagactggtgatttagtcgtctcagattggtcagtctggagacgatgaacctagccgatcgagctaataactggccaatcaaacagaagaaaaaaatgtcgccacatcgtctaagacgatcgaaagccgagacgagcgttccccgaccaggcccttaggggaagtcagaaacataaaacaaaaatagcagttctcattttaacccaagaacattatttggatcgtttatttagattaatctatactcggaggcccgagtataattaactcttatttaaactaggctacgcttcctcacatacacacgcacacgtgtaagctaaagtagtgggccaaagtaggcccattacacctggtagcactttgtagtccgtccaacgaccgactacctgagttcgtacgtcaccgcacgaacgaggagctgagaaccttcccatggttacagagttgcccatggaaagctccactacgcctgcaactcacattgcacgcgctgactgtccccacctgtcggatccagagtgggaggccctccaacgactgtcaacagtcattggtgaggcgactgtagctacgatgctgcgtacgctaacgccgacagagcaacacggtgtcgctctgggtttcatcctgaaggagcaacgcgatgttgctgctactaccgcggtgtcgtccgggacgacaccacgcgcgcaatcgctaaagctcaatgtgagtaactatgtcggaagagagggtgaacctctcctccgttcgtatcatcgacccgttgtcgaaggttgcgttcgccatgtcatgtcttggcggacgtgcaagaagttgggcgtatggacgccgactctcggatcctacgtgctttagcacgtacgagggtttcaaggaatagctcatacaagcgtttgagccaccgcaaaacgagttccggtcgagggcggagttcctcgacctgcagaagggcaagcataatgtccatgcttacgctcagagagcacggtacttggtctcaaacatcgtgaccaatccgatcgacgaggagaccaaggtcgtcacgttcatgaaggggctgagagatgggcctgtgaagacctatctcttccgtgagtacccgagtactctcgaagctgcaatcactcttgcaatgcaggaagagtttagcctgcggcaggctaagctgcatgcacatgcgccaaggccacagcctcgcccgatagtgaggacaggaggcccagaacccatggacctctcgagcgctgcaactgctggaccccagcagtcgcacggaaacaatgtgcgatgctaccgatgcggtagaatcggtcactttgcttgggagtgcacggcccccgtgcgccagcaggatggctatcgcggcggtgccgggcaccgtcgcaaccaaacaaaaaacgctggacgccagtaggcgcggggcgccctactcgtaatgcagttccgcgtgtcgaccttggacacgcgacactgaggactgcagcccccagtgaggttcatctcactgcaagatccaagatgacaagcctgaccttgtcatcctgaacgtgaactcgatgggagcaagcggctctctccgtgctttggtagattctggcgcgtcgaagaattttgttcgactgcgaagtctatcaaggcttgacttcgaggatttaaagatacctcgaagtatgttggaagtgcgactggcaacgggtgccatcgtaaagaccgagtagcgcatggtacgcgtgcgcttcacgtatgaagatcaagcatttgtcaagacctttatcgtcctggatctggacgataagtttgacagtgtattgggcatgccgtggcttgcacggcatgatccggtcatcgattgggacagcggaacagtgagcgatggccctgttgccgctacgcacgcaccgacaggtgcgcgcgactccccactcgagacagcgcctaatgccgctgtcccagagcgccctgggcgcgcgcgcaagatcagctatcgtcggcgttaccgccgacagataatgaaggaaatgtgttgacctcggaggtcgacacccgcttttcagcgaatcaggaagagtctccgacctcaaggggcacggatgacgcaggcgagtcacacgcctcagccgtggaggctgacgcgaatctgattggatcaggtctggccaataataagagccaatgtgacgtaacgccgtcgaccccgggagtcgatggcttgggtgaatttgattcgtcggctcggggagccgacgcaccctccgtaatggagggctccgccaataacaggcgtcgaggtaaagatggcgtgtcggctccgggagccgacgctgcaggcggtgcggacggttgcaaacgtcccacaccggaaaaacttgcatgctgtcgtgcagccgggcttgaagtcgctcgcccgcgggatgaacccgccggcggtactaaagaagaacacccgtccacggctgggcctggacgaggtcaagaaccaagcggagccgggccccgcaaaacaagaagacggcgcatgcgaagatcgctgcgcaagtctcggcctggggccgagacgctacaaggaatgtctgccgggcagacggaggctgagaagccggacgtcgagacgttgaacgtcttgacgcgtacctgtgccgggttccggtacagggagatgactctcgctaaccctccgacgcaagcgtcggagttgacttcgcttccagtcatgagctggacgcacttcgcgcgtgacttgcatgatggacgcatcgagcaaatatgcattctctcggacgccgagagaacgaagagcgagaatgaagaactaaggcagttcttcatggagaccaccactgagagcgaggacactctcagcgcgaagacgaagaaggagcgctttgaagagcagagctgggactcgttttcaacgagtccctactacgagatcttacgggagtacgcggacgtacttccggaagagattcctgcggagcttccgcaggataagggcgtccagcacgagattgatctcgtgcaggggacgaagtactgtgtcacgcggcagtggccactgccgcgagagcaggtcaaggcgatcgacgacttctttgagagtcgtcgcaaagctggacaagtgcgggaattgaaatccccgcacagtgctccgacggtctgtatcaagaagccacagggcggttggcgcatcgttcatgcgtacaataagctgaacgatgcgacgataccggcgcagacaccgataccgcgaaaagatgtcatcatcgattcgatggccaggagcactatctacagtgctcttgatctgcgcgatgggttctatcagatcctcatgcgtgagagcgatatccctctcacggctgtgagcacgccgatcggcatgctctgggagtggctagtgatgccgcagggtctgaagaacgcccctgcgaccttcaacaggtgcgtgccgcacttgttgcgctcggtgcgcgacttcgcaccgagctacttcgacgatgtgttcgtccacagccgggctgcggacgggatgagcgatgttgagatgcacaaggtgcatctccggaagctgcttgcgctcatgcgcaagcacaagctccattcgaacctgaagaagtgcatcttcggggcgagcgagatacccgtgctcgggtgtctcgtcgggaagaacggtgtccgccctgaccctgagaaggtcagagtgatcaatgagtgtccgacgccgtcgaacgtcaaggaactgcggcagttccttggcttggccacgtactgcaagtacgtgaaggactacgcgggcactgtcacagctcctgaagaaggacgccgagtgcgtttggactgctgagtgtcagcaggccttcgatgcagtcaagcggggcttgactgaggcgccgatcttggcggtggccgaccaagatcgcccattccacgttgggtgtgacgcatccgacttcgcaatcggatgtgcgttgatgcagcacgatcacgagggccgtgatcgtgtcgtctactaccaatcgcgtcagctgaagccagctgagcgcaactacccggtacatgacaaggaactccttgccatgaagtacgcactcgcgaagttccgagtgtatctactcggaagcaaaccgttcgtggtctatacggaccacgcgtcactacggacggctgtgaaggcgccgcacatctcgcaacggatggcgagatggctctcattctgcgcagagtataacttccgggttgagtacaaacccggaagactcaatgtggtggccgacgcgctctcgcgtcgacctgactacgccacgactgatgccgatgtcaatgccattgacgccatgcgatcgagcaccccaacgtcgtcactgttggacgacgtgaagatcgcgtacgcgcacgacgcggacgcgaagctcttgctggcctacggctcagcgccttctgacaaagctcctcagaagttgccgaagcatcttcgtgctcgtgcacccgataacggtgtgcacgacgggttattactctatagtgcagtcgacgacaacgcggaccgcattgtcgtgcccaatgaccatgacctgtgactcaggatcatgtacgagtatcacgatgcaccgactgcggggcatccgggccgtgagaagacataccttcttctcacgcgagacttctactgggcccaccagtgcaaatgggtgcgcaagtacgtccgtgcttgcgaggtatgtcaacgtgtgaagcctgcgcctttcgcgcaggctcccttgcagtcactgccgactccatcggagtgttggcagtccatgtctttggagttcgtgttcggtcttcccccggacagccaggggaacacgggcgttgtggtctttgctgaccgcttcagcaagatggtacatcttgctgcggtacccgctgaagtgactgcgaagaagacggcgcgtctgttcgttgacatggtgttcaaacaccatggcatgccgatcgacattgtgtcggatcgagacccgcgcttcactgcacacctttggcaagaagtatgggagtcaactttcgatgtcgactgcggaccatccgcagacggacgggcagaccgagcgcgtgaaccgcgtgctcgtagacgtgcttaagagctacgcttactcgttccaacactggagcgagtgcctgccgatggcggagttcgccatcaacaactcggtgcatgcctcgaccgggcatacaccgttctacatgaatgccatcaggcatccacgcctcccgagtctactcgggatggtggctccttctttaagtgggggaggatctacgactgcaacgcaccagctgcagaatgccgctgacacttgcacagtgtcagccgcgactacgcgcaagaagaacaagaagcacgcgtctgtgcagggcacagacaccgcgaagacgaacgcagaggccggacttactgctagaaacgagctgaacgagttcagctcgggcgcaatcaacttcgtgcagcgcagacaagccgtcattcggtttgtccaagacgctatcgcagcttctgtcgaccgacagaagctgaacgcagacaatgttggtaggggcaacactaatgaattcaagaagggttcattggttttgttagcaactcataacctgcctaaacatgcagtttccgacttcggggcgagcaagctcgctccgcgcttcatcaggccgttcacggtgttggcacggcatggcaacgcctacacgctagatattccatctagcatgcgcctccatccgaccttctacgtcgggcggctgaagccatacctgcagcacgagccacctagctcggctggcccgaagcggaagccccagcgggagcgaacctctgcttcagtgcgtgaaggcgctggggcaagcgtgcgacgcgacctcccacgtcgacagagatgtccgacgcggtctgcgaggcctgagcgacttgagccctcaggatcgccacctcctgcttcagagcggcgaactcccggctctgatgctgttccacagcagcgacccgctcctcgagcgtcgggccaaggtcaaccccaggttgaccatacccggggcgtgttcccaccaccgccgcctccgatccgcgacgcccgcggctcgacacgctggattgttgagcgtattgtgaaccatagtatcccgaaaacgaaccggcagccggttctttatcgtattcgttggagagggtttccgccccaccaagatacatgggagccacgggacgtcctgctgcaggacgttcgggaattggtgagggcgtacgaagctcaccacgcactgccgacgcgaaggtagtgcgagcgctgcggtcacctacagcgcccgaggtcccacgatcgtcgcgttcctcacgtgccaagaacttggcacggcgatccttgagactcgcagttacacgaatcgtcgtgtacccgtttaggtcgcggtcgctcaagcgcgccgcacccggaagacacaacgtgcagcgcatggaataccagcgtccacagaggatctgtggagctgctccagccgcccgcgcgtcgagaatgtctcgaagcgctcacgggcatgcttaacccgctcgcggtaagcagccggtttcttgttgaagttctcaacaaaagcattctaagacaaagtgcctgccactcaggcactttgctgcgagaagaggtcttcttgctggagaagtaccggagcttgtgaaagagcccaatgtagtagtcgcgcctttgattcgttaacggatcaaggtgctgctcctccgcaacagcatcgtcgtagataccgctgcatacgtacagcgggatttcgtttggaggcacagtgttgcccatgtcgtaatgcgggttgaaggattgtgaggcgatggacccggaggttacccgaaggtgacccgagagtgagccacttgaattatgggacaccctagctcggtgtcccgtatagaaggccggcgactgattacgaaacccgatggcgtatttacggagatccagaacggggatgcccgtaacaaggacgatgacaccgcacggagacagcagatgacgtcatgaggtaaaggcgtgcagcatactggttggttggttggccggcagacgagccgcccgtagataggcagttcagttcagaatttccaacaacgagacaaggtacttcttcatattagtctttgtgttgtgcggttagcgcctacgtgtgtactgtgactgtttcctacctacttgcgaagtgtactcggggttctggattgatttggcctccccggtaaccttctagtagcgtagtgtgttgcattgtctggactcaggagatcagcgctcagtgttcgacagtaggacactctaaacggtttagtaaggtattggtgtgcgtctcgcactttggtttggacccgcagactagctgcggcaggagatctccagtagatctcgtatatattgtacaacaagttgttgtacagtgggaagcgttacctcgctgtacaagtgcatccgcgacagagttaacctaagtctctgcctgcaagtgtaaggaaccccatattcaccccttcatattacacgtcttctaggaattacgctagataaagatccgagtcttgctacaagggtacacaaggtgaggcctagagatctcgggactagttctcgttgtctttgggtatttggcttgcaggggtaacccccccccccgtagttgcgtggcaggacacgtgtgggagtttattagtttttatcagagggactccaccatacccacatggtctgcgatctctgacgcagacggcgtccacggatcgcgcgctgcctgagcagcgcgcgtacaacttgaaggcaccacctcacgcggggagcttaaagccccagcagcagagagcggagtgtcgctctcgccgcgcgaacgcttcgagctcgaagcgtccgaatcgtctccttcacgagggcgtctcgacccggcatgccgggtcgagactatcgctgtcgatagactccttgcgcttgctggaagaggcctcgccctcttccacctccacgtcgtcgtcttcgtcgtcgacggcgtcgctgactacagaagaaccttcgaggacaatctctggttgagttgtccccgccgtagccgtggtagcaagagcgtcacgctttgctttgagactcggggatagagagagtctctatcccggcggaggacttcccctctgctgcagcgtcagtcttcttctgaggcgagctcattgcggaatgagctcgagttttctttctcccaacgtgaagaattgacgaatggtcaatttcctgattgacgtgccgtgactcggcgcgtctaaccttgaggggggggggatggtgtaacagggttacacgcacaagtggctaccgtcacttgtaacgctaacagatacgacgtctgttagaggttcgaaagactttctcgaccttggtgtagacacaccaaatgctatatacatttacgaccatcacgacgggtggtccatagcgacttaggattcctattggctgagaccagcatctcttagccaatgagcgacatgcatagcattggaattctgccaaccagccgttggcagattcttatcgtagaatattacatttagaggaagtcagaaacataaaacaaaaatagcagttctcattttaacccaaaaacattatttggatcgtttatttagattaatctatactcggaggcccgagtataattaactcttatttaaactaggctacgcttcctcacatacaagccacacgtgtaaactaaagtagtgggccaaagtaggcccattacatcttgcgtatcaaggcagactgaggtcgccccagggactggtgtggcgggtgcctaatgtgctggcgctggccgagacgttcgtggcctcgagcgcgcacttgttcttgctgctggtcggaccttgcttcgttcgatcttgcttcgacgcggcagaagacggaatgaactactctgaaactaccgacctcactaacactaccgagaatgtacccttgcacccaggggagttgcctcgcaaccgacgagaaggacaaaaacaccctccggtgaggccgtcggcagcgccgtggaactaatcttggacagcggtttcgtggacaccgcagtcgagctcctcagccgctgcctgcacgctttccttatgtactcgatcgtcagcgtcatggacatggacgagcttgccacggcgaacccgaaaaacacgtttccttctcgctgcactcgccggaaacttcgcattgcactgagtcagcctgtgcacaagtggggggatgagcgtccacatagttgcctatttcatcagcacagcgaatgtggttcggagaatgctggatggtgcgctgttttccaccctggtggacaccaacgtggcgcaggttgagttgggatcgttgtccagcttcgtgcgcagattacggagcgcgagtgacagattgccggacgggaagtaggtcttatactcgctgtctagggcgcagagccctaggaaatattcatcgacttcaccccgtcgagatcccacttcgaaaaatactgaaagttgtcaggagatgtccccgcagttgtcgcaaggtcatcaaggatgtatcccttgacgctgactggattgagatgcatgaggcgtccaagcaatgcggtaccgtagctctctccgcacatgaacgagctccctccagtcgagtgctgggcaatacatgaggcgatatccgacgcagcactggttaccgagaacgcgacgaggtctccgaacttggtgtgcaagtctttcgcgcagaacggaacttccgatgtgtcaagagcaccccccccccccccccccccgcgacggagacccagacgtcgtcgcatgcgacgcgacgcactcgaatggggtgctgcggccagtgccgcgatgacccatggtgtacacggtgactatcccctgcaggcgctcgtgaagttccctcatcatctcctccactgagaaaacaaaacagcaatatggcattagcgtcaatatgttacgggggagctatctctagacgaaaagaatgagcaaacttactgataacggaggtgtcgcccggtccaccgggaattatccaagcattcgaagccgtcgcgggatttccagacgaggcaggaatggacttcacgaaaatgtcaacatttcggacgcgccgtcttgggtgccacacagatatcagggtaaaacaacggggcggggtacatcgcgcactcggcatcttcagattctagccgctctccggtggttgtgttcgagaaggtgatctcagagcacggatgccacccgtttagcgggcgtttcgtagcattcgttgcctcggcaatctgcacggacacgcagaaaaccgcgagggctcggtagagcagcgtattgcttcgagaatatgtggttcgtcgcactgctgtaggagatggtcggttgagggatatttgagaaatgcgggacaacatcgaccaaagtcgggagctgtagtgtagatggccaccaatcgattcaactctctgcttacccctgtacattctgcggtggagtcatcagtctgcaagtaaactaccttattggaatttctgtggtctagtttacgtttacagtacgtgttagtatcaaactggctgtaggcgtcagctgttcaacgtgctggtggcattaccgaattacctatattatgccatacacttcagcgaactctatcgagtcgatatttcggtgccctggctagccaagcaaattcatagaaaacgcgtttcaatacaaatatcaagtgagtcatcataaaaaaatggcagtgcacaccaatctttccgaaaggcctgtgatcggtcaattagggggtgtatgacataacatatagaaggtgatatcataggtaatcagtactgaacatgttctgtagaataaaaggaaattaacaattgtatttctttttattctactgtaagtgtaatattatttgaagtttgaaacgccttgcgatcatcatttggtggatacgattttttttctgtgcatacagtaagacaaagcacatgcaaaaggatcaccgtcgagttgccgtgactcacatcttcctttgagtcgaggaacgcagcatgtgttgcggtcagtactgtatctacggttagaaaatacacctggatgttgttacactctatatctataacgcgatcatcaatccgtgagtgagtacgtcttccgaatcttttaattattgtaaaatcggcatttttgcccctggggcactgcgttagtaccccttcgagtgatcagggatcgaaaaataggattgttggtgagatcgccgtctcaatcaatattgtaacaataccaatatcctgctctctgaaatttatttcagagtctaccggtgataccattttccgtgctgttttaatatacagcttacccgggcccacggatcacttatattatattatgttttatggtattgtgctttgcagttattttgcggaccattttagacgcaaaatatggcaaagcctgctcctaaatatgtgtgaaagaagatacacgacctgctacaattatgcataaatccacctcctcatatatatatcgacttggaagggcctgtcagcagccatgcattggcccagtacaccaccgtccatgatccccagcacacccaccctcttatgcataattaccgtgtgtgtaggtgcttgtggataaaaaccgacagaattgcagctgaacagccacaattgcacttttgaaagtgcaattgtggcgcttttaaggcctccacccatttatgcacctcgatttatcgtaaatctagcagtggtcgctataaatacagcaaatctcgcctcatattgccaaaatcattgcaaagcacaatatttgtattataataatacttgtgtttgtagtactacacatgtattggcaaaacgttccaaaaaatattataaattaacgcaatatacttacataaagttaaatggaggggtactaatttaattctccattaattttgattagatatgacgggtggagctcaatatagggtgggatacaattaccgattttacagtacaatcccagagcgtcagctgtccggcaccgatggtacttatccaaacaagagacaccacttagtgagcatttcaacgcgccagctgggcggcgctatcagcttcgtcccgtagtgtacaccctgaatgatcttgacgcgctggacccgctgactacgtcttttttaatgaagtcctgggaaaaactcagtgtaatgtacgtactgttattgcgtgttacttcggtaagggttactaccttacgagtgagagggtagaccgtaaaaaaagaaaaacgaggcagcgcaaatctaacgcaatcaacagcattttcgaattcacggagtagcagatggtcgtggatgctacgatagtgttagaacagatctaacgcaatctgaatctcacaccattgcactaagtaatccgacgagttgcgtgagtctttatcatcaaaacactctggccagtaggcagaatagatatttgaacaagtttttttttttaactacacaccgtcaagttgtggtcgatgtatcgaacttgagcaccgtgggtgttcgtagccgtcgatcaacaacggcatgtacagttatacaacttgaacgtactgtacagtacagtaccggtagcgtaaaacaaatcgagttttaagagatgacctatagcgcgataatacaatttcgcaactagatcgttgctaatggttttgcatacagtccacatgacacattgatgactccatggcagagtatacagagtgtacaatgaaaagaaagagtgcagtggtgatcatcaatagctcgagcttggtcgatgctatcccgcattcctgaaacttccagccaccaatcatctctttctgctgagcgaccggacaacatgctgttctaccgggccctcgcagtcgttgtactctgcgcgtccgtgcatactaccgccgcaacgaatgctacgaagcgtccactcaacgggtggtatccgtgctctgagctcacattcgcagacccaagaacaggagagcgcctagaaactcaagacgccgagtgcgcgatctactccgcccgattgtgctaccctgggatctgcgtgcccccggcgacggtggatccgacagtcgacttttttgtgaagcgcatccctgctactgctgggaacgctgcgacagcttcgaagacttggttcttttccggtggacccggcttatcctccgggaacagtaagtattaaccgaaatagttttttttctcggtatttcctgcacaagaggagaaagccacgttgccacaactggagcccagtcatggttcgcgctcagctgcatcaagttcagcgacccgctcatgctggagagccccatggctatgatttggatagactgtcagataagcggttttcacccgggggtccgaggaaccttcggttctgagggcccagcggtttttgctccgccacatcgcacagagtagttatagataggtagtcgttcttgatcgtctcggccggccagtcgcgctttcacctgctcggacacagctgcattccgacggccaagacaccagcgctgcggcccgaccaatcgcccgcgctttgattcgacacccaccacaccactccctaggctgcctcatctcggctcattacatgaccctcaccgaggcccgcctcattaatcaagaacgaccacctttgcccccagcgtgctttcgtatcgcaggaaggaaaaggtctaaaatggtgattctgtttattttgcagtggagaaaaggatgagagaaatccacgagggtgcggtcaatgtctacagcttggaccaccgtggcactggacgtagtacccccttcaactgcgtggcctcgcaagcaacgacgtctggatctccgtggggcagcgctctcgaactgtctgacgttccttactgtgcaaaggacttgcacacctagttcgggatctcgcttcgtcctctatcaccagtgcagcatcggatatcgcgtcttcatctccgagtactccaatggagcgagcatggagagagctacggcactgcattgatcgagcggctcatgcaccttaacccggtcagtgtgaagggctacatcctcgatggcgtggcgacaacctccggggcatctttggacaagtttgagtattattcgaagcgggatgccgatttgggagaagtgggcgagtacttcatggggctgtgtgctctcgacggcgcgtgtaaagctcatttcccgtcgggtaatctgtcgtcggcactccgtgatctgctgacgacattggacaccaacctcaactcaacgtgctcgacgttaatttccgtcggggaggatagcaacatcccgtccgacacgctcaaaccgattttggccacgctgctgagagaggcgggtacatggacgctcttcccgccagtcgtgtacaagctgagtcgctgcaatgagaacgacgtcaatgtcctgaaccaattctttaccttctacgcttcatacactacgtacccttctaacaccgaaagcatacccttggcgcgtctgcttaacagcctcatcatgttctccgagatgtgggaggcaccgacgccttccaacgacgacctgtacgcacggttcgcgaacgcaagtatcactagcggagatatgaatggcgaggctacgacgtattgcgccttctcgaaggagaaatcggcggtgtgcaatgagattaatggggagctcaatgtcggcaactacgacggcgacgggattatttacaagcgcgatcgatattggagcaaggcggcgacgctgtcagtgtgctgctgatgaacggaaagctggaccagcagaccccgtacaagtatgcagtcctttttcaaggcgctcggcacgaccaagaaagaactcatcacttttactacgcggtccaccacatcgtgcgcacccccccccaatgaccccgacctaacctgcggaatgacgctattggtgtcgtacatcaccaataatggcgaccttaagcgcctcgacagatcgtgcgtgagccaaatgcccaaattcaacctcacggtgccaccggcatacctcagcaacttcatgaaaaccgacgatgcatacgacggtatctaccaagcgggttcgagctccaactagacaccagggcatgtcgagttctcttaaaaagcggtcaggcgagtgtcagagcgttctaaagacaaatgttgggaccgcaaccgcggcgttaggcagtgagcaaaacatgactcacgcacgaccttgaattaatgaaattgtgttgagaggacaagatagcgaaccagtccatgcaattttcaaccgtagcaggacgtcggtagcatcctgaagtgaaaccagttgttaagaaataggcccaggatcaacatctctttattatggctgcgagcttaggatcggggcaatctactgcttggacacgccgtagtcggcgcggtaagcgcggatgaccggcaggtacgaggcgttggcgtcggaggccacgtccacggtctcgaggtagcccacgaggttgtcgagcgtggcgatgctgaccacggggatgccgaacgtttctctcacctggtcaatggccgagcgcgtgtcctcgatcgacaccttctcctgacggtccagggagatgcagacgcccgagacatgcgcgttggtcttctcaagaatagcgaaggcctcgcggatggcagtgccggcggtgatcacgtcgtcgatgatgaggaccctgtcgaatgtaacacatgcataggtcagtggacacgcccaactgatgtcaacgactagctgaaccaaacagccacgtacttcttgccggtcatgtcggcgccgacgagcacgccgccctcgccgtggtccttggcctccttgcggttgtaggcgaagggaatgtccacgccgtacatgtcagcgtaggcaatggcgaccgcggccgcaagcgtgatgcccttgtaggccggaccgaacagcacgtcgaactccacgccgctgtcctgtagagttgaattgaagcacgcgaaataaaaatcaacggtagtaacaaatcccccgtcacaccaacttatcccacggtcagtcatcaatcaacacgtacgtggatcgcctgcgcgtagaacttgccgagctggccgagcgcgcggcccgtgcggaacagtccggcgttgaagaagtacgggctcttgcggccagacttgagcgtgaagtcgccgaacttgagcacgccgaacgacagcgcgaacttgatgaactcgttggcgctcgacttggccaccacagcagctcccaccttgctcttgcgcacagcattgatagcgtcgcgcagctcctccgccgcctgcttgggctccgcagccttggaaatgccgcgcgacacgggcaccagcaggcccatgccgtccgccgacagtccggcgctcacggcctcctccaggttgccgccctgcgcgccgatgcccggcgcgaggatccagaggttgggcgtgacggcgcgcacgcggcgcagcgcgtccacgtccgtggcgcccaccaccaggcccacgttgtcctcggcgttccactgctcgcacttgagcgcgacttcctcgaacagcgcgcggccgctggagcccgcgggcagcgtctggaagtcgtcggcgctcgggttggacgtcttgcacagcacgaagcagccgcgctcggggcgcgcgcgcacgaacgggtcgatcgagtccgcacccatgtagggcgcgagcgtgatggcgtgcgcctgcagcacgtcgaaggccgagacggcgtaggcggccgccgtggtgctgatatcgccgcgcttggcgtccagcagcacggggatgccctgcgggatggcctggatcaccgcgtgcagcgccatgacgccctcggccccgaaggcctcgaagaaggccgagttgggcttgtacatggccgccacgtgctgcgtctgctcgatcaggcgcaggcagaaggcctgcgcggccgcggccgtgggctccggaagctcggcgacgtgcgggtccagccctacgcacagcagggagtccacttgggccacgcgcgcgcgcacggaggcgaagaagctgttcgtcatcgtagtcgtcgggtcgggtcgattaggaggtgagccacgtttggctgggctagagctgtttggagatgtgcgggttgtgattggctggaggatggcgagatggagggttgcgattggatgaaaacaagaagtcgaagttgaggccggctagcagggattttgccctctctatttcagactcgacatcaggcgatggcgtggtaagaatgagcgactgcaggatggtgcgtacatgtattttatttaataatacaacatccattatagttgaagcagtggctgcaaagtcatcacagcgcgcgtgagtgcgccgtaccgtatgcagtatatacgtgcagagcaagccgagtgttgtacgcagggcttcgcatcaaccactgtatcgagggtgatacatactagatgaaggaatgcagatgagtgtattaatatcagatgaatactgctgatgctgtatgtgatactgtggattcggcaagatcgccgctaagtgctggcgttccaacagcaatctgtactccttccagtttgctttcataaagcacagcatctctgcgcgtttgtcgtcaaggctcgtgcggagatcgttaacgatgtatccagctatactgaagaatctctcctgcggtgcagtggacatgggcttaccgagatagattcgggcgaggagagcaaccgaagggaagtccctttctccagtctctttaaaccattgcaagatatcgatgtcttggtacaactgtaggacgttgtaagcttagctaccgttgttaggttggcagggccatgtcaccgataactcctcccactcctcccagaccttcaaggctgcttttgagcctgttctgctgttttcgatacttcgggcggatggaacttcgacttctagcagcaagcgaagcgccgaactcaccccttgatcagcactgaagcactggcgctcgaacacatcactgggcccggactgacggattccttcgaaactttgagacttttgatcgagtttcttaaacatcatctcatgctcctgtcgtaactcgcgtttgacacgttcaagtacttctggatcatcaactaccagcgacgcctttgctttgattctcgggtccagttgtaacgggctaactgcagcccgttacgtggtaacacaagcagaggaagtagtaggcaaattgaactctggtattaagtgccgagacggtctcggcactcgacaccgtcccagccattaaacctatggtgggctctgattggccaccgcacacacacggtggcgactgtgtgacagtggcctgtcacaccaccccctactcaagattggaacatacacatatctaaactccagaaaggaactgcagggcttcgcgaggcggacgtgatgctacttggcaagcgcgtgccgacagcgcgcgcgaagtgagtaaagcagcgcagcagtgtctcggacgtcatcaagggccggctgcagcgcgaccgcagcagcagcgtgggcttcaacggagcgatcttggtgcagcgggtctggcgctggcgtggcatgaagcgagtccgtcgcggtggtacgcaccgtgactccaccgtgggtcaggtcgccgcggatcctggaacaccgaaggtcgtccgtcgtctgaagtcgagcatcgccgctgggcagtccgttcttgcgagactctcgttgagttaggcacggctcgccgccacgcagtcggggacatctgcgagtacgacctcgcgtggctcccagctgtcgtccatcgggccaagccatcgaaccagataccggcggtgcgaaggtatctctccctcgcggcgacgagtgccgcgatccatgcgtgcgcgctgcggtgcatctcggtggtcgtcgtggttgagaatggcttcgacaatgtgacgctggttcccagcagcgtccactaggggagcaggacggtcgcgctggaatgcagatgcgcgaacctcgggctgacgctgcgatggcgcagcgtcttgatcgacttgggcatgttcatcggcgccaccgggaatggcggcgggatggtatcgtcgcagtcggccaacttagaacgtagggtgcagccggagtgccgtagggagctgcagcgtgtaggcgtcgccgagtaccttcgtcactttaataggtccaataaatctcgttcgcgcccaagtccgtcaccaaacttggcgacatgcccgtcgtagagagcagtacctgatcgcccacggcgaacgtctccagatgtcgtcgccctcgtcgatcggcatattccttttgccggtccaccgccgccgcgatggtgtcgcgtacataacgcacaaccgactcacgtttctgcaggaagtcgcggacagccgcagtgtcttggggctgcgtcgctgggagcggatcgaagttggcaggaaccggcgcggcaggtgtcgccgcctcttgcgcgtcttgataatcgacgacccgacgtgatatcgggtcaatcagcgtgcgcgaagtccaagctgcgatgtccgaaggtgccgccctcctagcggcacgtgtgcgcgaagctcgttcggggttggcgcgtggtctctcgtgtgccgcccgcgtggcggcaagtgtgcgtacttcgactgctggagcgttagagcctcgacgagtggtgacgccatgtaacaacgcggagacagcatcgggtacggggccacgacgctcagcctggcctgggtcggggtctacagcaatgtcttcatccggaacgagtgacgcgagatcgcccgcgtcttcagcagcgcgaccagccggagtctcagagcgctccacaccaaggagcgctggaacgagaggatggcgaccgaagttgacgaagaacggggacagcccggtcgatgcgtggacagcgttgttgagagcgaattcgaccaggggcaggaaggtgctccacgacttgaacgacgtagcgaagctgcgtagtatgtcttcaacaatacggttggcgcgctcagtggccgtctgtctccgggtgcgacacggtggacatgcacaaccgcgtccccagcaactgaaaaagctctcgccagaaagcagacgtaaagcgagggtcgcgatccgatacgatggaggacggaagcccgtggtgacggtacaccacgtccacgaagatcgcggcggtttgcttcgccgtgatgctggcagcaacaggagcaagatggagcatcttgctgaaccgatcaacgaagacaagcacgtcagtgcgcccttgagtgtctcgggacagcccgaagacgaagtccatgctgacagacgcccatgcgtctgtggcgactgggagagatcgaagcggagcctgcttggacggattcggcgtcacgcgttgacacgcttcgcaggagcgtacccatttccggacccacttgtacatatgcggccagtagaagtctctggacagcgacgcgaacgtcttctcgcgtccgaggtggccaccgctcggcgtgtcatggaactcgtggatctgccgagctcggagatcgtcgtccagaggaacgacgatgcgcggggatcttcacggtcgacgcggtacatgagcaactcgccgtccagcgagtagcggtcgacacgggagcggctgcgttgagacagcttgcgcttcgccacggcaccagggtctcgcaggaactggatcagctccaagcaggacgcgtcctccttgtacgcgtctacgatcaagccacggagcggactggtcgctgcaacctcaacagcagcgacgtcttcggcagtgcatacggcgcattcgtcgtcgtcctcgtcgccaactgcgtggcgacctgactgcacgtagtcttccccggcttgtagtgcacgacgaagttgtactcggagaacagggacaaccagcgcgccatgcgctgggacaagtgggggctcttcgtcactgtcctcaacgatgcgtgatcggtgtagatcgcgaaggtctgttcgccgaggagatacacgcggaacttgatgagggcgtagcgcatggccagcagctccttatcatggaccggataattccgttccgccggcttcagctgacgcgactggtagctgatgacccgctcgcgtccttcgtcatcgaactgcaccaacacgcatccgatcgcgaagtcgctcgcgtcgcactcgacatggaagggcttcgcgtggtctggaagcaagagcacaggcgcggtggacaagctcaacttcaccgcgtcgaaggcggcttggtgctcgggacgccacgaccacgtggcgtctgccttgaggagttgagatagcgggcggatcgtcgaagcgaagttcttcgagtaatggtgaagatacgtggcgagccccagccactgccggagctgcttctggtcctgctgcgtcggccacgcgcagattgcctcgatcttctcggggtcggcgcggacaccgtccttgctgacgtagctcccgagcacagggatctcgggagcgcagaagatgcacttcttcaagttggcgtacagcttgttctccttcatcacctcgaacaccttgcgcaggtgttgtaggtggacctcaacgtccgtcatgccgtcctcggttcgactgtgaatgaagatgtcgtcgaagtagctgggcgcgaagtctcggtacggccgaagcaagttggacaccatccggttgaaggtggcgggggcgttcttgagcccctgcggcatcacgagccattcccacaacatcccgctgggcgtgctgaccgctgtcagcggcacatcgtcttcgcgcatcaagatctgatagaagccatccatcagatcaatggcactgtacttcgtgctgccggacatggtgtccagcaccatgtccttcctcgggatcggcgtttgcgcaggtatggtgacctcgttgagcttgttgaaggcgtggacgattctcctgccgcccgttgctttcttcacgcagaacgtcggactggagtgcggcgagagactctcgcgaacgtggccggcttgccggctactctcgaagaaggcgtcaatggcttcgacttggtcgcgaggaagcggccactgccgcgtcacgcagtacttcgcaccgggcacaaggtcaatctcgtgtcgaacaccgcggtcgggtggaagaacggctggaaccttgtccgggaaaatctccatgaactcgcgcacgagcggagcgactgggttgccggccgcttcgagcgccggcaacgactgagctgcgtagcgggcttgacgggcgttcttcggctcggctccttttgggcgcgtcctggtgtcggaagctgggtccgacgcactggttgcgacggccgcaattgactcggcgtcttcggcgacgatcatgcacacctgctcgatctcgcccttcttcaggtcacggaggaagtgtttccacgagagcccaggcagccgagtgatctcggcggcgtcgcacggtgacgtgcgacttcgatgttgcgtacacgcggaggcgcctccgcgtcgtcccccaccaggactgagatcacttcagtctcagcctcaactgagtccgccgaagccgtacgaggacggcgcgggttgcgacgtccgcgacgtcgaaccggacctggagtgttgtccgaagctgcccatgagagcccatgctcgatcacggtcgctgaactggggcgccgggacacaacgtcggcgcctggacgcgggtcattggacacgaccgcgtcgacttcatcagggagctcccgctcgaccacacgcgggaacccatgctcgaccgcgtgtgggaggccacgctcaaccacgtcttctcgctcttcaacgttggagaaccgctgctcgtcctgacgtggctcgaccacgtcattgtctgcttccgagaaccgctgctcgtcgggacgtgggaacccatgctcggccacgtcagacacgtcctgaggctcctgctcaggaccgccgcaggttgcgagttcgccccaccgcgcacgaagggccatcgctcgcttcgtgcgcagcatgggtcatggagtcgaggtccaagacggcaacatgcggccactggttaggcgttccgcacaggaacgccaatactgcattcacatcaatgtcccgggggcggactgtgccagtcagccagttgatctcaggctggtggcgagcgagccacgggatgccgaagacacagtcgaacgagccgctcagctcgatcaccaagaactcctcggaactggggaacccgtcgaacccgtacgcgaaggtcgccgagcgccgcggcgaccttcgcggcttcccatcagcgtacttcacgatcatgtcgccaggcccgtcgcgaatgttcaagtccaccggtaacaccgacaagctctcggcgcgaacgaagttgttcgttgcgcccgagtccagcagcgcgcgaagagggcgcgtcgcgccgtcaacgtggaggctaagcacaatcagcctcgtgtcactgccggaggtggtggcaaagagttgtgcatgaagcacgggagggctaggaggaggatctgccaccagagaaccatcgatccttccacgaccagtagggcgccccgcacctactggttgtcgccgttttttggagcggcgacgtcgttcgcgaccgtgacgttcgcctgcatcggcgccggagcgcggcaaatagccgcgcgatgtccaggtttcccacagcggtagcagcgcatcgggcggggattgcgcgttgacgaggccgttggcggccttgctgatgacgtcggcacccgacgtccaccgaactgttgaatcgcatccacctccatcggctccggctcgggcaccggagcccgagagacatcgaaagcctgcgacgccgtcacactgtagtcttcacggagcgcaacagcgaaggcctcgtcgagtgttggtggggtcttccgggtcaggtagaagcgctggtagccagcgctcatgccggagatgaagacgtggacttgggtcgccatgtctacgggatgcgtcgtgatgcacgacacaaggtgtcgtgctcgatggatgtagtcgagcatggacgtgcgtccttgcttcaacgccaggaaggcggagcgctgaacgctttcatcttggggcggctcgaacgcgagccgcaagtctgccttcatcgatgccatggtcgggaagcaggaagcgtcggccacgagcttgccgagcgcccactccttcgccctccccgtcagcttggacaggagagagcgcgtgcgcgcgagctcggtagacagctgccgagcttcgatcgcgatgtccacctcgcagaaccagcggttcaggtgaaggcggccctcgccttcaccgctgtacgtggagacatcgagcttcacgatgtcggacttgttcttggtctgcgtgggagtcgacactcgctgacggaggtcagcgagttcacgcgccatgaactcctgggcggccaggcgttgttgttcctcggttcccgccgtcagtagtgtcttgatcacagcgtcaccagacaccgctgcgaggcggtgtagcgcctcccactcgatcgccgacaggtgatgaaagctggcgtgctccagtgaagtggcagtcgtccgggacgcgtcaggcatcgacgtgtcgtgcatgttcatcacgatcttgggcgttggacggattagcgaagtgctaccaagtgtaacgggctaactgcagcccgttacgtggttacacaagcagaggaagtagtaggcaaattgaactctggtattaagtgccgagacggtctcggcactcgacaccgtgccagccattaaacctatggtgggctctgattggccaccgcgcgcacacggtggcgcctgtgtgatagtggcctgtcacaccagtagtatcgccttcatttcattgtcgtcaggttcagggaagcgaagagcccactgctcatttaggcgcaacaggcaacatttaccttgttctgaaaagttcttgacctccttggatatacgcctctgcgtaaactcagtgctcagtacatctgggcgctctagcaccaagcacggaaacgtcaatttcaggagtttacgaaaaagaagagcgttcgaaccggagaccccctccttttgcacctcaccaagactaaactgtgccaactggttagtaattgcctccatttcgacaataagattccagtcatcatcggaaagctccagccaggttgcttgctcagttgctggggatcgttcaaaatacttcgagaacgcgaaacagttgtagaccgagcgtcgcaatagcgttgccgcgtagcccaccctagttttagcgtcaatcgcgatattcactacccgtcaacggacaacttgtacgttgacgggtagcggtgtcgcaggtggtaggtagcttatccgatgagtacgaacttgttggcaccaaacgagtcgggcgttcccgacgactgggatagtacctctatcactagagcaactggacccaccgcgacgaagatttctaaggactagcagattcgtcgacgacgatcacaatcgggcttctttgacaaggttaatactgtcttctcgtcttcgaaagcaactgcagataagcttcagaggtggctcaacacagggaaacctgcagacactggtttcgctcgacaaggctgaggactcactgttttccttcgatgacttcgagaggctcactcagtggctctaatacgtcgacgatttgagtgccaaggatcccacgaaggggtcgtccgcgatgtcgacactggcggctcactactgtacgacgacgcgcctgtgcaaaatggcgaagcgggctgcgcagagtccaagaacaaagggcgttgcctcgaggttacaggccgagcaactgcagtactggttggccactgcaaaaaaatcctgacgacgtgttgcacgtgatgaagctggacaaggcgagcgtagaggcccgagctcgcgatttgtgccaacgacgtggccgaattcatcccgaacatcagccgttaattgccaaaaccctcacgaagtttcatggagatgcggttttgaccagaatggccaacgagtgcaaagagcgtgaaaggaaccaagaatatcgcctccaggttaaaagacgagctcatagatatctggcttaacactcggacgacaccagcagatgtcttcgaggatctcgcaagaagtcggtctcctatccgcgaggtatccccaagagaagacgacaattgttttgagacattgtcgcggacgctcggcgatcgcaacgtggccatggtgctcaatgcagcaaagaataacgataaaacgcgaaagattgccacggaattggaggctgcgcagccggagatgtggtggaacagtgggaaatcggtagacgtggatgacttcaacgtcctgtatcatcaagagaaggccacgatgatctatgccctcagatacagcttcaaagacagaattctgcttacgacgcttgatacggcaaagaagaacttcagcacggagaagttggcggcgaacttgcagactgcgcttgtcgacaaatggctcgctggcccacgtcttgaactttgaattaaaaagtgcttcttgagtttcgtagagatccaggaaatggaacgtggaggtggggtccgccttgactttgagccaggacttgacccacgtctcctcgactgcttcgtccatttgtcttgtgcttagactgttcatcccattccttgtaacgcgattgacgttctgataatggaaacggaacgtctcgaacaaggattcttcgaggtggtgggggggggggtcttgttgaaatcctcgacatactccagccacttcgtgaacaggggtcaccaagaatggaattgccaccgtccagccctagcatattgaacacaccccgaggggattgattactcgcgagatacgtctccatcttcgccgtttggattgcaacagcagagttttccatggtcggatacttcttagctatctggaagatttggttcaaacttctgcccttgaagcgagacgccagtgtgtccagctgcgcagcctccacttccgtggcaatcgttcgtattttagcgttatgctttgctctgctgagcacattggccagattgggatcttcgaatgtccgcgacaacgtctcaacgattgtcgtcttcgcttggggatacttggcgttatatgcgtcaatgtacagtaatggttcaactgttgtacagagggctttcaaacaattgagcgggctgtagaaataggagaacgctttcttgccaagtcggagctcttcgagggcatccgctggtgtcttgcgagtgttgggcaagctcgtttcctaacctggaggcggtattcttgcttccttctacgcttttcgcactcttagccattctggacaagaagccctctccatgaaattacgtattttgcccacaccacgagctcggggctgtagagaatattcacgtccacctcgtccagcttcatcacatgcatcacgtcgtcaggattcttcacagtggccaaccagtactgcagttgcttagtctgtaacctcgcggcagcgtcctttgttctcggactctgcgcagcgagctacatcattttgtacaggacagcgtcgtcgtagtcggcagccagtgtcgacatcgcgaacgcccccttcgtgggatccttggcgctcaaatcgacgacatattggagccactgagtgagcctctcgaagttgtcgaaggaaaacagcgatttcccagtcttatcgagacccatgcgagcgaaagtaacgttgcagatttccccttgctgttccatctttgaaaattctctggagttacattcgaaggcgagaagacagtcttaaccttctcgatgaaagggatggaaggtgtagtaggtcgaacttcaaaacccgaacacagtcgggggaagctggcacttccttcagttgtctgccgagtgtattgcgcttgccggctttgagataaaaccaaaagtgagaaactaaaacatgcatgccgactagctgctctacatcgccaccaccagcgtcccagtggtggcgctcttcacgaccttcagtaagagctccctactgcaacttgcaccttgcacctcgcaccagcttgagtcaacgaacgcacgcacgatgtgctcttgagcacgccaagccaacactcgctggttgcggcgcccaagttcaacacctctgcatactcggccacggcgctggctgagcaacagcacacatggctgactgcaacacgctgcccagcatcgccgccgcactcgactgtactgcgtggtcgtggttgggctttcatgccgccacccactacagaaggaccagtttttttctcggcgtcgtcatcgtcatccccgaatccgctagtccttagagatcttgccgcagttcctccagcgatgggggtaaactcccgattcgagcacttcgaagcctccgatctcaacccacgcggggaaggcgaagacgacaacggtcaaaccaacaaggcgaagtaggcgcatcaccgacttggcggctaaaggcaaagtgaatgaggcgtggtggaatatccgaagtgtttggtgccaacaaacaaattcatactcatggcaatgcatccacttggatcccaccagcgacaccgccactatgcacaacctccgaactcgttttatactcgagcttgagcacgcggaaaagatagagctggaatactttaaagaaatgcttcatggtgtgacaacggccgcgcgtggtatatcaagaatctcaatgcactgacggaaaatacgccgtgagcattagtagctaattgacacgaccaatctgactccggtcacgactacctggtacgatttgttctctgaaatttatttcagagttaagggacgattgaagtcactggtctgattaatggtttagtgcattcctgaccaagtcgatccatcaactttcatcgataaacgaggggtttcatacaaatagcaagccaaactgcactacagtggagtaaaagaatacacataccccgcgtaaggtgatattttaggtgaacaagcgacctcgtggcgcaccggtcatccctgataggcatcgccgggatgtccttgctgtgcttgcacgttctcctcgagaccgttcaacatttcaaactggttgtagcaaagttaaacgctcttcttgctttaaatctccgtaactaccgcaaaatgtaccacagcgtgaggtggctgcatgatcttagctctaaacatcaatcgagtcatttgatagacagtgtatgacttcagctatgaaagcactcattgttctctcagttcccatttcgcattgactactaaaccaagcaacagaccttcccactcaccaagccccagtccaatctacctgcaacatggagatgccgctacacgcgattaattccagtgcgtacaattgcagcaggcccctaccgtactaactaactagttatgccactcgacctggtacgtcaaacactacgtactaatcggctggctatcagatacgacactgaacgggggccgtagctaccggtgctgctgatcagtggtggtgttggtcaggagcagcccgtgatctcgcattgaaatacacgtcaatggcgcggagaagcacaagtataaatgcagtagctacgagaataaaagtgtgaccgccagcgacactgtgcaagttaccgcaattttaccctctgtcttgcaggagcggttgacggggaggcaggctgtccagcggaggggtgccgtacgacgagtccatttcggagtcggctcaaacacgccggattacacaattcaacatgcagacagttcacctgctcctggcggcgcttgttgtcagcgccaatgccgctgatgtcgctaataagcaaccactacgtactcacagtgttaacgaagatagagagcttccaactgacgagacgagaaggaggagaacattttcgcaccctcagttgtcgcaaattacgactcgcaatcctcaggggtctcctcgggaaaatcactggtatcgtcatcaagggcttcgcggctggaacccgaatttcgtggagaagctgaacgcggatcttccagcgattgaaaaatcgaagaactctgaatttgcttaagtgtagaggagaagaacatttcaacattacgtgcatccctttcctctttgcttcaccattcttttttttgaaaacctgaaatttcagagcttcttcgggccggaggcacgactttgtcattattagacagaggcacctgctggcacgaataaagttgttagccagccaaatgcttcgctatgtattcaatagtaaagcaagatgtggtatagaattaaggtttccgctccttgttgtggacggagaccagttttccgctcagcgggaaggctattgtggtccaaggacgctgctcagatcggtctgtgctgcatcgcaccaactggctacatcccaaatgcgctggcgcatcgcatggattcaatcccagcacccggatgtagtagaagtagtctagcaagtcattcgtagttttacctacaagccagcagttgccccaccgcacctcaccctgggactgctccaggccgcaccggcccggagcgccttaacgaagtcgaacacgaatgatttgtggcccccagccgtgagcgatagtggaaaaccccatcaatcctgttttgataggcgttcatcaatcagtgaaaaacataatcatttggttgccaaatttccataaaattcgtgatgctaccgctctcctttaatggcagctgccattaaaggagagcggtagcatcacgatttttgtagcgcagacgaatatacacacttgataataatgaccctgtttcagatgggcttagccaaacatggctaaataaatcataagaattgaagaagctccattctgaagaacaccacaaataattacagcacaaatgttgcgtcaaagccgtacaaacaaacctatggagaacgaaaaggcgaaaccatcatagtgccgaccctaactacactcataatcatactttcatcactattttcattcctcgctgacagcgtggtatttcagagcccgtcgacgtgaactattaggtattcggcctcttaacatcctcctttcttcgtgcatcgagctcggaatgcgctttgcataggcaactacatcaaaaagaaccaaaacaggacggactaccaagaatgcagaagcgaagcttagtcaagaaataaaaactaggttatattggtttaagccaaggtaaaacccaaaaaatctttttgaaaaaatcaacaagttttgattatcggtgaagaggcagccgtgttctgcgtagcaatccataacagtaaacaggatgtggaaattaaaggataagatcaagaaggcgaaagcgaacgacttgaggcatgccaatgcgaacaagctgcacttattcctggcctagaataagaacacgtggctctcgtctgacttgaatggcataaagaagttgaagaaaggcgagaagactgctcacatccaagcactaacgacgaaagaccaagtgctcccatccgaggtaaccctgaatgacgtgtactgaatggaacggaatctttatcatctcgccagatccacgtacttgtgatactccgagcaaggactacaagcacagggttgggaaacgctctcgacataaaagatagttgccaaaatctttcctcccggtaccgaagaagcgcaggcagtggatacatggatgaggagaagacgaacagctttacaaggttttacatgatgcgagacttccctccagtgggagggaatttaaaacgattgttgagagagacgcgtatatcgcgatctttggttcgataatgcaggaggtaaagtccagttttgaatacgaggacagtgaatcggaagaggaggctgaactgggcaaggattgcaaccagattgtcacgggggatcctgggatgggcaagagttgattctacctgcattgccagtttcatctcacattttgcaagtgagagaatgtcatacagccgcctccatagacagatacttcaagtacgacgcagcaagcgacggatttgtcgaattgatcgaggaggatcttacctcccttcagggacaacctcctgtgctacaatttgtcgagacaacattaacgcggagtttgggtactgtttgccgctcctaatgctgaaggcatgggcgatttcagaaagtgggttcaggcatatcttgccaaggtggaatttggaggagatggggccatacaacatattggttccggttgctttgaacacgttcggtagaaccccggatttgttttctcgagacagtgagaaatattcatgataaaagttttttgttgggcatggtataatttgatgatccacaagaaatgtagtgaccaaacgagcgcttgatgaaggctggggtactaccggccgataaagaaagcatctcgaacacttggtatgctcatctcggacggacgttctaaatgctttggttgcagagacgctgagcgaagtaaaaagttgggggattgaacacgtttttcgagaggttcaataaatatggttgttacagacatgaacacaaatcagttctacactgtattcggcatgcgtggttccacagattcactttggaaacagagcagacgcccaaatgcctgcagatacgcttcgcgtgtctgtgttgaacttgtttgtagatgcaaagtccacacttccgccccgaagagcagtatatgaggagaatgaatgctctttgacgttgaattgataatcgtattctagcgattctagcgggtgacaggtttgcgagttactgcaactaacgctgttgttgtgtttccaacaagttcgagagggagtgaaccacagacagatttcaagctagcgtaagtgctttcatggctgatggcagacgttcgtgacccaaggcattttcagctcttgtccagagagtcccctgcctagtggcgcttattggcacaggtgaggtcccggtcttcgggagtcgtcagcgatcgattcagcaatggaacctcaattcaaaaccaatgcattcgacgccgacttattacagaatctgcacatttatcaacgcattctactcgatagcctttactccggagcagcacggactgctccggacgttggatgtctcgtccttgtcatgatgcagcatgtctgctgctggcacccacgcaagcgggtacgccagcaacagacatgctcaaggaagacgtacgtggtggctaggaagtcaggcgtcgcagcgccgccgcctcctcctccgccacaagtagcttgcgcgcggagtcgcttgaaggctggcgccaggcttgcgcaagactgcctggcgcccggaatccagaactctacctgcacaagtatacaaacatgcatatataggattacgaaaacagaaaaacacttgcatttagtataggttagctcagcttctagaacgacactaaggagaaagcaagaggaagacatagagcccgtagctagcccgaagacttaaaggcatcaatctcactttgcattttacccaaaagcaagcaagcaaccacaacaactccacgcactttcgctacggcaggccccaccgcatcggagcctggcatttggtagcacttgcttcgctcaacctcggagagggctacgggcaccggtgattggctgtaattcggacccacctgacatctgtaaagggaacgtcggcataagtacgaggcaccagttgtagcggcgcacccgatccagtccggctttcgagttcggcggttaggggtagtgcagtccgctctgagttgcccgggccgcttctttgattggatggctggacgtaggggtcgtcgcgttgacaacgctgttcccgacgggtcttttgagaggctgggcgtaatcgacgccaccgacatcgacaagttgcgcaccgattgctaccgtcaaacccggcacgcggtgcgaacgaccgaacggctgctgagagatcttgctgaggtcaagccactgcttcggaggaaagagaccagaaaaaggcggtcatccaccagctctgtcgcgtccagcgtaaactcggcaaggcgaccggtctcatcaacctcggtgtagccaggattttggaccctcgtaccacccgtcagcaactccagcacgacaaccgtctccgtgaccgcgaggaagcccgccgccagcgtaacctagctactgtaagggagctgattaactcgactagcgagcagtaaacacgttttagtcgcttttttcggcaatttatcgtagtgtgtgaaaacgaataccttcgcgggtataacgttttagagggaatcagctttgttactatttagacttttgggttaaggtttccgcgtgcgaaaggagggcgaacaagatggcggacgtctcggagctcatgcaaggagagctgcagctgatgcagcagcaacaagagatgatgagagtaatgaacgagcaacgaggaacgaatgacttcaagttggatgggattagactatccaagtacacggggcatgagtctgagtcgttccgcctgtatcaagaagagttgtcgcagtactttgaggcccgcaacattgactggaagaacgagcgttgggcgacgagggtactggccattatcgggagcacgttgaaggggcaggctggtcagtggtatccggcgcggaagcatgagatctactctgcggagcagttactccgagagttggcacgcgcgtttgttccagcggatcttcagttgcggctgcgtgagcagttgcgacacctgagccagaaatcttgcaagtcgttgggtgattaagtttcacggtttcgcaacattgtactgcaagtggaagacatgacggagatcgacaaagtggtgtacttctcgcaaggattgatgccaaatacacgtcaagaagtactgtacaagcgttgtgaaaccgttacggatgccattacggtagcgatggactatgagcgctcgcacttcggtgctccggcgcgcacgggacgtcgcgaccgtgatcacccacgattccggagaaacgagtcgacttcaagatcaaatggtcctgagccaatggagatcgacagtgcgcaagagcttagtccagaagagtgccgtcggcagaggaaatgttacaactgcctccgtggtggtcacattgcagcccactgtaaggctcctcgtcggaaccagcgcccctacagaggtccgaatcagcgtcaacgagactcgcagcacgtcaatgctgtggagcaacacgtcagcgaggtgaagaaagaatcgtgtacgatcagtacactgtggatgcatttgaggaactcagcatacatgacatggttgctagaccggataatgagctcattcgcaaacccgggagaatcgaagggcgcccagtaacgatactgcttgactgtggtgctacgggaaatctggtacggccaggaatggtgtcgaaggtgacaggaactaaggatgtacaggtgaagggcttcgatggagagatcaaggagtatcgcgatgtgaaggtagtggaagcggacatcagcatggaagacaagacgttcgagaggttgcgtctaacagagagtccactggcgattgaacatgacgttatcttgggtaagccgtggtttgccaaatattagccaacaatcaactggcgaacgcatgaagtagtatttccgagcatggaagagagaccacggcccaagacggacaagaacgcaaacaagatggaagatcagaaagaatgtgagagagacgccgtcacaatggacccgagcgaaattgaagagtcggagtcggcagaagatcaacgaaagaaagcggaaaaggaagcagttcgcgcacgttatcggtcacatctcgccttggctgaggcatggcgtaatggtgtctttgggtccacgaagaagtttcatcgtcgtatgcaggacaggaagtttgcggagctgttcttcgtcaaggtctgtgtagcggtggaatctgacaatgtaccagactacattaaacctttgctggacatgtttggtgatgtcctcctagaaaagttgccagatggcctacctcccgagcgcatcgtcgagtgcgacacggagatgatgcctaacaccgctcctagcacccgagcactgtttcgactgtctaaaacggagcaagaagcattggaaaagttcgtcgcggaaacatgaagaaagggtggatagaagtctccaattcaccctgggtctccaatatcttcggtgttcctaagaaagatcctgcgactggtcaaatcccgaagcggacagaatggctgcgatccgggaatagttccattccgattcgttgggtcatcaccttccgctatgtcaacagtcagacgaagatcccgaagattccattaccgctaatcgaggaaatctttgacaagatggtcggctgcacagtgttttcagttctggacctggcccaaggttaccaccagatgcgggtcaagctgcgtagtcgtcagtacaccgcttttcgtactcacaaggagactgaccagtgatgtgtcgctccgatgggtctttcgggtatgcctggggtttggtcacgaatgatgcgcgtcctgtttgacaagttcgacttcgtcgtggtctatttagacgatatctgcatcttttccaagaccaaagcagagcatctcgagcatctggaagcggtctttgaagtgctccgccatgagaagctttatgcgcaccgatcgatgtgttcgtttggtcaagagagtgttaactttctcgaccacaccgtgtcagcagaagggttatccgtagatgcgaagaagtccagggctatcgagcaatatcctgaaccaacgaacaagaaggagctgcagagttttatcggtcttgctggctacaatcgtcgctttatctgtgactttgcgcgacacgccctacctttgagtaagctgactaagaagcaagctacttgggaatggggtccggcgcaggcagacgcttttcgatcactgaagctcgccttgcagcaagctcctgttcttcgtttgcctgacttctcgaaacctttcacggtcacaaccgacgcatcgggtaagtgcatgggcggtgtgctctcgcaagacttcgacggcagcagccacccgattgccttctactcaaagaagctcaatgtccatgaagttggctggcctccacatgagcagaaacttttggccatcaaaaccgctctcgagaaatggcgtcactaccttcacggccggcactgcgatgtctttaccgacaatgcagcttgcaggtgggtgttgcatcaccctcaggtatcgcctaaaatgggacgcatgcttacattcttctcgcaatttgacttcacgatgcatcatgtgaaaggtcatctcaatgttgtgaccgacgccctatcccgtccaagtcagctcccggcgaccgacgacgaagttacagacgagcccgagccttggaagttaccagcagttcatgattgttcgtcatcctgtacgcatcaggcttcgaggcttcgacgtcacagtgtccacgcagcaatgcttcgcttgcttccgtccgacgaccgctgtcttcttctcgacgatctggacttgcgggaggagagtcgccttattggggttcagcaagaagtcaatgttcacgtggaacaagtccagaacgtcgagtactcgacatccagcgtgtatttcagcgaagatcagaagaagaagttccaagctggatacaagcgagaccccgcgtccaaagaaacatggaaccgaccgaacaaatctgcagacttcgttaaatcgaatgggctcctgtacaagtgttcggatcattcagtcatgaggctgtgtgtccccaataacgctcggctgatcacgaacatcttgcaagaattccatgatgcacatacggcagctcatcctggaatccgtcaaacgcagttgagggttgctcagtggtacttctggcccacgttggagaaggacacgaaggaatacgtggcaagctgtgggacgtgtgctagatggaaagtaagtaccgcacgcaataaaggcactatgatgccaattccagttccgagtgagtgttgggaagtagtgactatggacttcgtgacagggctacctgtttccaaaggcttcgatgcgatcataacagtggtggacaaactgtccaagcgacccaagtatattccgacacatacgacggcagatgccccggaggttgcacgaatattctttgaaggagtcgttcggcatcacggtctgccgaaggtgatcatcagcgatcgagaccccaagttcatatcgaagttttggaagtcgctcatggatatcatggtggtcaagctgtcgctcaccacggcatatcgagcccaagcggatggacagactgagcgtcagaacctggtcttggaagatgcattacggtgcatggtgtcctaatatggtcgagactgggctacacaattgggaacaatcgagtacgcacatgcgacgctggtgagctcctcgacaacgcttacaccgttcgaagtggacacaggacgcaaggtcaggaacttggtatcccagagcacacctggtgaagttcgtgatgaagatgtcccgctagttgattttgcgcagaagtttgctgacgaacgcaagaagatcattgaattggcgcgcaagaatctcctggcagctcaagaacgtcaaacgaagtactatgacaggaagcgccgagacgtggagttcaaggaaggagaccttgtcctgctggacacgcgtaacttgccactcaagcgcatcacggctaacacggagctcaaccgtgagaagttagcgatgaggtacatcggcccgttcgaaatcgagaagatgatcaactccaacgtagcacagctcaagctaccacgccacatgagtcgccttcacccgagtttcaatgttgagttcctcaagcatgacgttccgaaccctcaacgcttcgcgtcgcgacctttgcccaagtctgcaccagtactcctcgacgatgaaaccgacgaagaactacatttcccagaggctctgctccagcagaaacagcgcaacaacaaacggctttggctgctcaagtggcacggacttcccgattcggaaaccacttgggagtacgaggtcaagctcaaacgtgtatcgcattggcgtgaacttcttcacaagttccgtcaacagcgccaacgcgattaaaagtccggggggatgtcatgatgcagcatgtctgctgctggcacccacgcaagcgggtacgccagcaacagacatgctcaaggaagacgtacctggtggctaggaagtcaggcgtcgcagcgccgccgcctcctcctccgccacaagtagcttgcgcgcggagtcgcttgaaggctggcgccaggcttgcgcaagactgcctggcgcccggaatccagaactctacctgcacaagtatacaaacatgcatatataggattacgaaaacagaaaaacacttgcatttagtataggttagctcagcttctagaacgacactaaggagaaagcaagaggaagacatagagcccgtagctagcccgaagacttaaaggcatcaatctcactttgcattttacccaaaagcaagcaagcaaccacaacaactccacgcactttcgctacggcaggccccaccgcatcggagcctgtcagtcctggtactctagggaacggctttgtagttagggttgaagaggctcttgtcgacgtagattatgatgtgggtgccgcagattgtgcaaatcggcgggtccagacaacgggaacgatgtccaaaacaacttgtttggattggttttatggatctcgaagttcattcaggtacatgctggcgcgtattatgtctagaattgaaagtgctgactccaacgagagtgccaggacccaaacacgatatttgatacaacgtgcaaaccaacctgatcgatgtattgattatagcatcatcgtcttcaatcttcaccaactgactggtccaatatcattcgctcccactgaaaacgtccagcgcagctacaaactgattcaccttcgccgacgctccaggtttttgactgaccgcaccggttgtcgtcgtcctgggtgtttgtttccgaaaagactctgcgattttgcttggaaccacgaatacgaagtaaaactgatccgttttgatgccagcacccttcaaccatttgagaaacgtgttcagtggtgcagctttaattccacgatcctcgttcagcgtcatctgcaatccatagcatttcgagctcccatccgagataaatgcatccagcgctccaaacgtttttgacgtcggtcggtagtacgtccagccctccgcgagctgtagtttgtccagtgcagcgaagcgtaccgttttcaagtcgtgcggaatgatgaaatcagccagaggcgtcaaacgcaacgggcgaaactgcaactttttcgtcttggacaagcagaaccattagtgacacagcatctcgtaaatctggcctcggacgacagccgtactccccgagtcatcatcactgtgagctatagcgaattgagagactccgtgtaggctttcttcatgcactctggcaacgaccgactcagcaatatgcttggacaaaaaatccaaatgaaagctcccgcggaaatcgtctcgtgtgggaaccatttcaaggacacggtggcttaagttaccctcctccactgcgtgattgcatctacaataagcgatgatatcaagcgcactgaatgagttaagcgcctcattcaaatcgtcttgaccatcgctctcagctctcgtgaagacgaaccgggggattccaccaaacttgtagtatcttgaaaccaaatcttcgtcagcaagtttcaggcggcccgatagcaacgcgttgtattgtttcagttcctccaagctccatgtcggcaagatgtaccggaaaccacccactttcgcgaaatcatccatgccttcagcatcaggagcagcaaacaaaatcgagactccgctccagcccacaagccgcgtcgatgttgcctcgacaagtcgaagcatgtgaggttgggcccgaagcagatcaacatcctcatcggccaattcgacaaattcatcacgtccagcgtcgtacttgtgaaattcatggccgtagttcatcaccaactcgtatgggggtagctgcttaatatcctctcgttcacgaagaatgagttgaaagatgcaatacaggtagaaccgactcttgcccgtaccaggattgcccgtgacaatcaggttgcagtccttgcctcgatcctcgtctggttcactgtcctcgccgggataatctagctgtgtctgatcgtattcgaagtttgtcttcacctcctccattaactgggcaaagatgacgacgtacgcctctctctccacaatcgtttcgtattccttctttttgtgcgccaacgggggaaagcctttcatacagaaaaacctcgaaaatgggtccgtctcgtcctcctcaacgtgtccgcccactctgcgcttcttcactactggataaaaagacttgggcagccatcgagaccgtcgagagcgtttccccctcgctggaaccatcacaagcacgtggatctggagaggcgatggagggtccattccattcagcgcggcatccaggggttgctcggactgcagcacttggtctttcttcgttagcgcttcgatgagaccagtcgtctcacctttcttcagctgtttcacgacgtccgagtctgatggaagccacgcgctctccatcttcgccaggaacacctccagcttgttctcgtcgacgcccttcaagtcgtgctttatcgctttcttgatcttatccctcaacttccacacctgcacgtcactgtcgacctccacgccgaacgactctcccgccttcccgacaactgcgcaagtcagtgacagcttcacatctttcctcaacacgaacgattctcaaatgggaggtcaagttcctcccttgatagggtggtcgtacttaaacggattctgtttgcaaggaaggttgatgtacagtagaatccgttgtgcccaaagtcgcataatacaatacaatacaaatacaataaaatacaaatgcagtacaatacaaatacagtacaatacaattcattacaatacttcctccgttcaggggcatttggagtgtccaaattggacaaataaaaaatcgcgaccattttctggacgaggttttcaccctgacagatgatggccacccattattttattcttaacccgatggatggtgcccccccccttcagcgtcaaggagcttcgtcgcgtagagatcactgaccagcgccggatccagcgaaggtgcgtttgctacttacgcaacaagtcgaaggtgacttggttccccggctacattgacatcctgcaacataacggtcagtgtccttacgttgcgtgaggttggcgtgttgacatcctgcaacattgccagtgtgtgcgctgtctaactttacatgaattgttacctggagcccgaatagcaagcctccgaataatacattgaagtggaagtactactgtaatatttgtatggaattatttattgttttgcaacctcgaaaaatatcaataacagacgtcgagtaccgtcaaacattgttttgtaccctctgctgtattataaatctcggtccctgccagtcgttagccttcgcagccgtgcgcagctgcagaaccagccgcagcttgctgtcttaacactttgtaggcctccgcattcccgcaggattgcttcctgttcacctggagaccattcttttcctcaaggtgaaccgccagctgtggggtgtgaagacggtagcagacgtagtgaacgctacaaagtgagatgcaggccgtagtggtacgatattgcgcggtcagcaggaataatgtatgtatccgtaccaagaacttccctacaattagttactttgttgatttacttaaatttcattgcagacgaattgtcggagggcctgccgaataggaactaaatccgggagcccagggctgtgttggagctgcctctgaatggaggaatgtgcgattgtgcagagaaacttcgtcctagtagtcgcaagtgatgcatggtacgaatatattttggctgcatttttataaataagcaataatgaacattaaaatgcacattattggttagatgttccagaatgaactgactttctcatcacgaagacgggtcgcttagaacacgaagacgggtgctcttcgcatttgcttgaggtggtacaagaagttaagctcattcggtcagtctttctgtgaatcgagtacaaatgtctcgcaacaaaaagcgggagccatgttctgcaggccgtttctagccgccatagtagatatccgctcaaccatccctgcaatggacttttaaactacaatgcatatcaattaaaaaatgaatttgcaggcagttaacccataaagaaaaatgttggatatttgctttgacagtttgttcggggggctagaggtaggataatacttgtatcttaaaactgggttggaactgcgtttggacagcgatcaagtcgagcatactccggccgctttgatggaatttgctcgattacaccagatcgattgtcacgaaccaatttgaagcgcattacttccccaattgtgccttcgccagcgtgcttaaacttcagtttgcaactccttaccagtgcaacattttccgctagaaataaatcaatacacggagccatccggccaaatttcgttgcaggtagcccaattctttgtcggagtggcttagtttatacaaaacgctttgagattggctgctacttgcactggatgtcgatccgttggaagcatgattcccgtttctgacagaataatattgcacttacacctgtgtcgagattttaggtgtggcaaggactgccggaaatattttagctttacgcggtcaatggtttcggggttgatcaagtaaaaaaaatgcagcgtagttgactctatggtactggatataataatgcatcccgaaaacggccccaacagtgggacaggtatttcgctaggtacgccgacggagacttgagctttagtaacaacgcgatagaagttgggctttaagctcagcagtgctgcacgagggagactgtctgcaagaaactactggagaggtggccttagaaacgggagtcgttctcattctttacattagtctatacaaatgtgcgtgcatcatatacttttccatccttcccataaattatttatacaacgcctcattaaagtctgaaaatatttagtttgatgaggtcggtacatgtacaaagcctcactcgttacaggctgatgatgatgcactgacttatcacgccaaatacgatttcaacgccaaataccccggacaccaaacattaatgctgccgacacttatgaaagtatacgacgatgctggccttctgtttagaagcgaagagtgtgaaaaaatcgaaacccagcgtgagtaatttacaggacgagctgctcaaatattggctacaccgtgacgaaaaacctgctcgagttcttgaacagctcggactctgtaaggagtcgttcagctattccgtcaatccgctggaaaatgttttggagaacccgttgtttcacagttgggataaataccttaagtcctttaacgtcaagaagccccgagataaaacgacgatactcgagaggttgacgcgggcattcgcgatgccgacgtggcggcgatgcttggagcggcaaagttgaaagactcaacacgaatcatggccactagatttgagtctatctagatgaactcatggcggagcagtgggaagtcaatcgacgacgttctcgatggtttacgtacatgaatatcgtcaccaaggaagatttccgcaaggcatctacggcgctctcgacactgctaactcgctttgaggaccgacctctgaatcagctcctacgagtggccaagacgttccccagcatgaatggcgctgctctaatatccagaagaagaggctgcagagttatctggcggcaaacgaattcacatatgaagtgttcacgaagctagcacttgacgacgtgggggaaactaaaactctcagtgacccgctgttatgaactacatacgtcaaagattggggacccgggtggtggacccggggggtttcgcagttcgaagctagcttgcacggatacttgtagagggaaacgatgcattcggcatctcctgcgcctgcttcgcagccgcagcatctgcctaatctagcactgtataaccaagtgtaccaagtttgatcgcttcttttcaaaaggcattgccagtctacagtatatattgtcactccgatggattgaaaaacgcagagtttagttgagttggtacttcaacgcttcgggctcctcgtgctcgtcggatcaatatttcacggatttagttttaattttagttcttttgtacttagcagaacgatcatcgacaactagctaatcaacgtactttccttccttccttcctgccactgaaatgtgcgctgatgcctaggcagaacatttttccgtgttttgctcggaaacttaccggaggagacaaaagaagaaaaatccgtgtatttgagatttagtgctgccaggctaactgctcaactgaacctgctgggaaaacggatgaagccagcaatttgtttcaaatttgatacgtcaaaactggatctcgatcgcctgtaggagcaggatacacctggtatttgcccttcgctttgatactgtccggtcgggcttcctctcgcgcaggaatccggggcgtacagcgacgacgtaacttagaagcattcaaacgctgttagatacaacatggcgcagtcacacacatatttcgtccgggtcgcctgaatatctaacaacaaaacccgtgtctgcttcaattcgtccaagtatgccattgccatttatcaagtattaagctggccgtaccgtattcatgtagcattatgatgttctaaactaacatcggtaacgatgtacttcgaagttgtttgacaagaacaggatcaagtagtgcataattgtattaatacaccaccagtagtgaatgagctcggggaatccctgctggtcgcaatgtagtctcacacaaagcaagaataataccaaccaaagtctgtgtagataaaatgcctgagcgacagcagctaggtttttaatgaacccacatgagccattcctagctcgattaatttgaactaggttccttccagtttcatacacggtcgtcattctttttgcgctagcttctagccttttctccggagaagacataccattgggtgcagctctttggctctctgctagatagcgtttgcgttggatacaaaatcgttgaacggaaaactcaagatatacctcccattttggatcacatatcgttaaaaataattgaagtagtttttggcgaagtctcagtggaatgttcaatctaatacaccttaacgcatttcaatacgtgtggggattcacacaaaccagcctgtcaacaatgtatgccacgaaaattgcacaagattttcagttaatctctctgattaactgatttaatcatcttctcgtgtgtctgaaagaggagggtataataaaagttatgacccatgacagaatgaaaaggtcgaattgacagtttaaatgctcgagttacggtagcatggccaacgcaaaatcgaagtaattcggaagtagtagtctgctctgcgaaaaatgccccaaacccgggacacgatatggcatacacacaacacgcagtgtcgcttttgtatgcaacaaaagtttatacactacaacgtatgcccagacgttgtgcaaacaaattgaattattcattccctgctcttcacacatcactacggaaaatcacctttcactggtgtgtcgacatttggcgaatctgtcgttcgttggatcccctcgacaggaatgcgaacgcacatgtagttcttctcgcccagcgtgagcgcacgtgtttcagggtgaatgctgcactatcatcacaccgcggccatagtgctttcgtatgaagaagaagtttattaactgttttttgacaagccgtgtcgctagctatggtaaactgtagtaatatctacttgggcaacttggattttgatgttgaacccaaattcgactacttttctttaggcaaactcactggtttgggtcgaagcccagtcgttgtaaaacagaaattattgcattcttgtcgagcttcagtgttcggaatctcacagcttagaaatagctataatatacacaattgcacctttattatttgttctagtcggcttcaatatcctttatctatctatgatgtgccgatggtcccgtgtagcatgaatgtcgttcgatgtcatccgccggcaggggaagctacaaatgtagcgcgaatgtcgttcgatgtcatccaaaaaccttccccaatcgacagttcttcgaactgcgaatttcaacaagaataatccaggacaggaaaaatctggttcaggacgcttcttcaccgatatacgtggggtaaagtggaagaaatggtcacgacggggatgaaaaatcctagtgccttgaaccagtgtttggaaaaggcaaggcttgaacattgcaaaaactggcggagaaagagtgggtcaagtactggctggacaaaaagtatcttccgcagcatgcgcttcactccctaaagctccacaaaaccgatatggcgacacttttcagcccaaagttcagaatgtgggaaaaatacctggatggcttcaacgagcggtaccctgaaaagaaagcggccatgatcgatagattcacgtataactacgacgacccagctctgttatggatgttccatgcgggaacgagcaaccccagtacagaggaactggcgacgaacttgcagagtgctctgatcaccaaatggatcgctgaaaagaaggatccaacggacctaaagctgaagcttaactgtgtgccaacctccgacgaaatgatcgagcgatacgtcaaggcattgtcgaaaaacacgaactgagcggtggattaaagttgaatggacggttgaaacaaaattccacttgtatttggttcttcttagcttaaaccccactcgtcattggctaagtttgatgccatgtaagtacaatacaatactacttaaaagtagtaatccttgccatttgtcggttctcaaacagttgctgaaagatcaccctaacgcatgctaggcgctatggtgatcactcaaggtggtggcaattcaccgaaaaccccacggtcgcgacacttcatttccgtagatatcattctcctacctccaccttctatcgttcccttctcctctctctgcaatatctccaactgatctacacctcccgcccagtcctcactacacctggtagccgcgcttctgcgcccctgctagtcggtccacgatctcgctgatgaccggcaggttgagcacgttgccgaccacgggcgtctggcgcaggaaggccacagccacggggaagaaggagccgaagaggttgaggaacccaaagctctgcacgatcatgccgatcaccgggtagcgcagcatcaccagcaaaatgccgcccaggaagcacacgatgccgcgccaccgctccttgcgcgtgaagaagcgcaccgtgcgcgacaggccgatggtgagcgccacgccgctcaggaacagcacgtcgcccagcgccagcatggccgcgtcgaagaacatgagcacgcccagcagcaagaaggcgaagcccagccccagcagcagcgtgccgatcttgcggttgtcgtccagcatcgcgtcctgcagctatagagcgggttcaagcgcggattctgggatggagagagtcttctctgtgttgcgcgactgcgacgcggagagatcggattgccttgggcgccacgtccgtcgaagagctgctgcctgctctggccttgcaggtctcttggtgcacttggacttggataaatttggatgaagggaggaaccgccgtggacgcttgtgattgggtcgattgatgggatgttttgattggataaatatggggtgattttaattttaagccaattggagcttggtgatgtgtgaccgtgtctttgacctggagcgggagctccctccctctgctggacgctcgtcatgctgctgctgatggataaattggcgtcttcgtgttttgcataatgatttgtgtgtgtgtttgttcaatgcgctgctgggcgtgctaaatagtctacagcttcggggtcgtctccgggggggcctcgggggatacagtcgagagttgagaggccggggctcccgcttcaaaactgccgcttggtttcgctcgatcacttcaactcgatccacttcaagcactgtttgctcaacgttgaagctggtcggacaccgagtcgggcgaaacccttgtgggcaagagggagggggcaggcgaggcggggcgaggctggtcgacggggagaccagggagggaaggcgctgcacgcgaaggtcatcgatgtcctcgtggcggggccatccacccgtccgtcccctcaagcactcgccggttcgtcgtcatcttccgtcttcaaccgcgttcccccgctgatatgatgctgtccttccatcctccagccttcatagatacgggctagtagcctccggaggacgaggtggacgaggccgtgggagatgcggctgctacagcctcctgcgggttggtctgcagctcctcctcgtcttggctctcgtccgtggacgtgtcctcgccgctgccgtcagcggacgcctccccgggggcgccaggcagcaagtgggacatcctcttggccttggccgtcaggtatccctggctgaactcgccgcccttgatcaccacgggcaggcggccctccacggtgatgcccagctggctcagcaggcggatcttgcgcgggttgttggtcagcaggcggatggactgcacgcccaggtccttgaggatggccggcacgggctcgtacgagcggtagtcgtccttgaagcccagcacgcggttggcgtccaccgtgtcgaggccgcgctcctgcatcgagtaggccatgatcttgttggccaggccgatgccgcggccctcctggggcatgtagatgaccacgccgccgtgctgcttggtgtacgccttggcgtagtccagctgctccctgcagtcgcacttgagcgagccgaagacctcggacgtgaagcactggtcgtgcacgcgcacgggcacgttgcgcttgccccgcacgtcgcccgtgatcatggccacgggctcgctctcgcgcagggagcccacggagcggtacgcgcgcacgcggaacaggccgccatcggtgggcagcgccgtctcggccacgaacgtcgtggtcacgcgctcgcccaggcacgtgaggccgggggcgtcggcgcccacggccggcacgtgcttgaacgaggcgttggtcgaggctgcgctggtctgtagctgcgtcatggtcatggctgtggctggcgtctatgggggcggggtctatctatctgctctgggccggccactctgccgtctgactcggggcgtctatggcctggcggactgattggggagtgagagcgagtcgccacgcaatcgagacgagcacgtccgggtcagggacctgtgaaaatagataccgcagaggtgggagtgattgaagataaagggaggatatgggatcgcaggttagttatagccgagattcgccgaaatgctggtaaacgggagagcgaaagcgaggcgatcacgagtggcctggtgtaagagtactatttgcagtggtcaaactcacttgcttgcttgtatttgagctcgcggtgcgggcttggccgagttggcaggacgggctgccggttctgatgcgcgactatagcacgctgactcgcccgttacccggcgacctttcggcgcgcgcgctccgccactcgttggcagctagttcgaactgagagcaactcacaccgccgtcgggcaaagctttcaacacaagggcaagcgattgcgaaccaactcgttcgcgatcatttggggtataaggtttcccaggtttggcagggtgtcgcggatcatcccgtaggggcctctattcggggtacatgatgacgcatcgccttttgtcgacgatcgacacttttcaacgccacggtacgattggctcaaacttaaattaaaatcgatgattggctaaaaggatggggcggttccgtaatcgcagatgctgacgcgccgattggatggtcaagttgccgctgttgcacctgtacgacgtacagtacgtgtgcaacatggcgtccttcctgcactttgtcattccttatcataccggcggtatacctaataattcaccgcgtccaggccgaacgagctgttgttgttgctgctcctgctgctgtcgaccgcctgatcgtccgctcgagtccgggcaccgaccacggattgctgggcaggacgctgtcgaacgcgtcggggatcactcgacggtcgcagcgctcgtagacggcgccgctgggcacccccacagcgaaggtcagtatggcgacgaccagctccagtggacccatgagcgtcaccggtctcacgaccgccagctcgtagacagccagagccaagtagatcgctgcaaacaccaaaggcagcccgtgcgtgacgtgtagtaggacgatgtggccgacgtacgccacgaccccgcctgcgagtgccagcgctgcgaacgccaagtggaatccaagcaggaacagctccaggtacgagatggtgcaggttgtcgtggccaagtgctccccagggtcggttgaaatgctggagcttgaacacggacgcaatgtgatggcgacaacgaccgccagggagtacgcactcagcagcgcgttgaacgtgacaagcacccactgcgcgagcaacccatgagtcgagatcggcatgggtctgtactgcgtgtgtccatggttctggagtgcactgcgccaactactatttcaggaagatggcggagttcatcccctccatgcacttctagtatatcgacacttgcgctctggatcaacaggagagaagctgatgaacaactcgatggctatcaccaagccaagcggacggcggctggagttactgcgctaggttggcggtctattgtccgatggctgctggttgtcgacgaggagctcgatggaagcaccccgttaaatgcgtcaggtagcacctgtcgatgggagcgcagctcgcgctcgtacaacaccccactgggcactcctacagcaaacgtcacgacagaaacgacgagctcgagcggaccgagcagcgacgtcaaatgatctgctacggcttgataaatcgcgagtgctgtatagatcgcagcgaagacgacgagcatggcacgcgtgattcgcaccagcacgatatggccgatgtacgccacgattgcacccgctagtgacaacgcagcaaacgccaagtggaacgccaacatgaaaagctccagctccgaagttctgcacgccctggtagcgctatgctccgctgggtcggtcgaaagacgggaggccgaacatggctgccaaatgatgacgatcgccaccgtcaagcagtacgtgcagagcagagagttgaaactcacgagaatcccttgtgcgagcgccccgcccgacgatatcgacatgatttgcgagtgtggagcagctttatttgcttctgttcaccatgccattcaccactttcgatcgtaacttggtatttttacgacaaacgaagacgttgtgactgacagggtccgttttgcttcgctggcatgcgatctgcatcacggaagcggatcaaacgatgaaacgaatgcccgagcagtgcccggcaagcagggcattagctcgattgaaccgaggttgaaggtgccatgcctctggacgacctgattcccatcggaggggcctccaagggcaatgcaagctcgaagcgaggtgggtcgagcgatctcacgagtggcctcatctcaatctccggtgctcgcgacaatgtggacgtcgacatggacgacttcgatgtcggcgagttgcttggagacggtccgagcaaaagcatgtccaagtcgaaggataaagacaagagcgacgacaagaagaagaagaaatccaaggacaaggacaaatccaagagctccagcagcagcaagaagaagagcaagtcgtccaagtcgaagaaaagcgcatttgatgacgacgacgacgactttggcaacgacgatgcgggtgacgagtggacctcttcagccaagaattgggatagcgctgtggagctggagatggctgcggctgcagcggcacgaaggaagaacggcggtggcaagatgggagggggattcgacgacgagttctccaagatgttggggctggatagtggagacgtcggttctggagccaacttcgagtctccgccattgtctccagaaccggtgacggggttgaacagggacgatgataaggttgacgatgatacctttgggatctctggctacacgccgacagtacgcgggtccaagaaactcgatacccctgctccggtcgaagagcctgccaaagcgggagatgacgggatctctgcatcttttttccaagacgacggcaaaggcgacggagatttatcgtcgttgtcctcgtttctaggaccaccttcagaccgacgaggtggcggtcgtggaggcagaagacagaccggtggtgctgactcagacccgttcggctttggatccacacctacaccatcaacatcgacctttgattctctctttcgaggctccagtcgaagaaacaacctcgatgatccgttcgccaagccaacaaaggacccgcttgaagagcaaaattcaaggcggcaaggccaaaatgaccccattgaagagcggaagacagatcaagtgcgtgaggaccctcctcgagatagtttctcaactcgtgatacagctccacccagccagcgcttatctgcaaaagacgatttacttgcggatctgttttcgtccgaacctcgcagtagtgctcgaagcggtcgacgtcaagaggaatcctccttctccaaacatgatgaagttgaagatgactacgaaaagaaggtcaatgtggagaagccaccagagccttcgccaccagtattacctgttgcagttgcccccgcaaagcagcagaacgacctcctggctgagttattcgccgccccgtcctcctccaaaagcgccacatacgataaaccaaaagctgaggaagaagctccaaagccgaagcctgcggttgtcgagacaaaatctgcaacaccgcccaaggcgacaactccagtgcaggaaaaggcttctgttttacccactgaaagcagcaatgccgacctggcgagtgctagagacagcttgctaatggacttgctgggtggtctgtcgcctccaaagcccagtgaaccgctgttatctcgacgccgcagccgcagctccaatagcagcaacaacagctcgcccgagaaagaagttggcaaggctgaagaccccttcaagagctccttaccgccgtcaccaactcaatcgcaacctcttccgacagtcccagaggcaccagcagagccaccagtagctgcagtcacagcaagcgaaagacctgtcacgcctccgtcaccgggccggagacggtcgttgacaatggacaaaggctcccttgcgatccgcgagagcgacttcgagcagtccaaagacagtctcttggaggaaatcctgccctcatcaccatcagtttctgctcggagcagtcctcatcgacgcaactcgtactcgcagtcctttgaggccgacgaaagtgtcgtcgctgatgttgctgaggaaccagtagatgaaataggcgaagaaaagaagccccaagttgcagcagagccatcagctcccgatgcccccgtcattgttgctcccactgcaatatctccaccaccacaagctgagcctacggttgaaccagtagtccgtgcaccaacgccagacccaccgccacctcagcctaccaagaacacagagcaccatgaacctcaagtgatccttgcgccgacttgcaactgcgacgagcgcgaagccaagctcaccgctgccttcgatcttgaacgagctgcactgcaacaaagaatcgatgagcttacgcagcagctcgaggcacaagtggcatcaagcagccaactcacgcagcaacttactcaacaacttgaggagcgagacgcgtccatgaaccagctctcgcagcagcttgaggcgcgcggagctgccaacgcacagctcgcccaacaacttgcagcagccgaacgtgccaaactcgaggctgatcaactcgccgcaaccagcaaagatgacgccgcgagcttccaacaccgcgcggagctgctggaagctgaaatgcggggactacgcgaggaattgtcccgctccaagcgcgcagtacaggacgcggagctggcgctggctcggaagatcgctgaacaggacgaagctgatcatttagagcgacaccgagagaagcgcgcgctggaggctcttagcgcccagatgcagcgggctttggctcgactcactgtatcacaccaagtgcaggaggaaggctctggctacgacaactccgcagctcgcatcgctgctgaagatgaagctcgccttcgtgttatcgcctcactggaaggaagctcgaagcgagctgctcaacacgccgagcaggagcgcacaaagcttaccgagttgctccgagagctggaggctggcgctcggaatgcacgtcaaggagctcttgaggacaaagagcgactccgacaagagcagcagcggttggatgcactcagcgcacaccttcaagctcagactgccgcattaagagaccaggaagcttctcacgctgcgtatatgggcaagcagctagcagaagctcgagaggatgcccgggtgtacgaagcgaggcttgcaactaggcggacgcagctggaacgcgacgaacgcgcgctgtacgaagcaagagctgagttcgcagcgttccgcgagcaaactgcactggagatcgagcgcgagcatgaagagctccgtgggtcacgactggcacttgaagacgcttggcgcgagctgcgcgcggatcgggaggaccttgaagcggaattggcgagccacgaagacgagttccaagcgcttgagagcatgcggcaggaggttcagcaggctgagacgcgtctggcagagcgcactcaagaggttgtagctctagcggagaagctggacgccggaacgcgcgagttgttggagcgtgagcagctcgtggcacagcaagctgctgttgtacaagacacagacacgtcgttctccaaccgagagcgagcacttgaacgcgtgaagcatgagctcgagactcgcgaacaacggctccatgttcagatccggcagcttgacggtgctcgcttgagactcacgcagcagcgacgggagcagcagcagttgatggctgctgcgagaaggcaatacacagcagagaagccgacgaaggttgctgtcgacaataacaagctttggcggcacacgtccgtagccccattcagcagcaacaactccagttactcaccgctccatggggaaaccaaattcaaagcgcagccttgggaagtggagcagcccattgaagacgaggatccgtccggactcccaccagcactgaggaagcaggtcgaagccaattggattcgacgcaaccagcaagtgagccaaatctcgagccagtatcgccaacgccccagccgcaagtttgattcccacgatttcgatgcagaacctctgagctggtcaactaaacccttggatctggagaaaccaagctacgctaacaaacacagcaatgtcagcactgcatcgaacgtcatgaggcaaagtaatgccgtcccagttcctcgccagaacgtcgaccccttcaaagcacctcagcagcgtcggtcgaattccacgccagcgcctgcaaagagctttcacacacctcaggcagggactccagtctcgcattcagccacgggatcacgtcaaccgcctccacctccgtcaatgcggtcgcctgggacattccagcccacactacgcgtcaacctctagatccgagtactgtaaaggttagtaaacaagtttttggactgcatttgactcgtcacggcgcgcgcgatggcagcgcggcataaactcgttccattttcttctagctagcaagtcagccattcgctctacgcgcggcagttctcgatgttgaagatcatgatgtccgtggcgccgatcgcgtggagctggtccatgacctcggacacgttcttctcctccaccatagcagacacagcgtagcctcctccaaccagcgtgttgaccgtgggggagcggcgtccgggcgtgatcttggtggcctcgtccagcttctcctggtccacgttgtacgtgaccatgcggtacttggtggccgtgatgtagcccaggatgcgctggtgcaccttgtgcaccaggtccttgtgcgccgactgcgggttggcgatgagcacggcctgggtagtcaaaatcgtcgagatcatctcgagccccgcggccttcatggtggtgcccgtctccacgaggtccacgatgccgtcggccaggcccagcgagcacgcggcctccacggagccgcccacgtacttgatcttggtggggcccgtggcctccgtctcgaactgcttgaagtagtcgcgcgtgacttccgggaagctcgtgacgatgcgcttgcccgccagcagctcgggcgccgcgacggcgtccttgacgggcgtctgcacgcccagcgcgcacttgccgaagcccagctgcagcagctcctcgacgttggtcctgctctcggcgatgatgtcctggcccgtgatgcccaggtccaggttgccctcgcccacgtacgtggcgatgtccgaggccggcaggaacacgagcgtgaccggcagactcgagcacagcgcgatgtccacgcggttggggcggtggtagtccaggcccgcgcccttgagcagcttgaggatcttgtcgtgcagacggcccttcttgggcacggcgaagagcaggcgctcgtccgtcttcttgggcacgggggagggaggcgtggccgacatggtgcttgggttggtgtgtgtgacttgagcggtcgatgaattgaatgttgaatggcgaatgtaagtcatggcttgacgcgtgctgattgggtagaaaggaatttgatcgcgcgtttgattggttgatttatccggaacgacgtgggttctagatctggacgttttagagattgtgcaaacgttctaccagtccgttccaaatctattgatatgtaccactatttagcttgttcctaaactataggaaaatactagtactagtttcactatggccagaatctgcagatcgatcgagaggaggcagaaatgaggcagtagtaacagagcacttgatgcaccgtggaagtcgtccctcccgcgcaagcttcgacttcgacatgtgtcgaatcttgaatgtgttgtcaccaccagcagcaacacaatcgttcatcacgcattggagcgtcaagaagcccgcgtccagtgttgccggcggcagctcgtccagcgccaccttcacgttggccaccaggtcgtcgagggtgtgggcggccattcgctcttgtcgcgactgtagggcgttgaagacagccagatccaatacgttcatatcagggctgttaggcggttggaaccgcaagtgtacatcgcacccggaggcgtttactgcctgcctccacgccatgtcgtctggctggatatgcgggaaggcgttgtcttgctgcacggtgacacgcctcccgtccgccgcacccggaaactttgcttggatcgacgggagcacgtgctccaccagcatcttgcggtaggtctccttgttgacggccatcggatatggcaccagcgttccagcggggcgattgcggctgcttcgtttcgctggctcgtgtgtcaaaaacgcccagacccccagctttccatcaaataacttgcccgtgatggggtcatggcgcgggcgggctactgctgctagcatcatcacattgggaatatgacgcttgctcttgagtcgatgcacaggcttgggctcgtccggtagaagcacgaagcgacgcttcaccttgcagagatagaaaagtttttcatccacgtggactacatcttccatgtcactgaaatgatgcgttgctgcacttacgtgccccacactaaatgcaatcctcgacttcttgttgtcgtccgacagcatgggcttggcaacggacgtctccacacgggtcttcccgatgctcacctgtcggaacagcgtggttggtgggaggaaacaggcttgggcggctgcacggatggtgctccggcgctgcggatcgaccgcgcggaggcgctccagcttgcgggaacggtcgacacgtctgcgcccagtgctgcgcaatcttgtgggcgatgcgtacaccccggtgcgttgaaagttgcccagggcccggcgccagacacggctgatggtctgagcgctgaccccgaagatgtctgcagcagcagatagcgcaccacacggtagggcgccgttctcgctcggttgaggagggccgacaccacgagggcacgttccgcgtccgaaaggtgcttggtcttggggtgcgaggtcttgttggggtgcgacatcgagtagcttgttgggtttggtaggtgggtgcttgggtcagggaggggcgaaatcgttaatggcagtggtggcttcttcatcgatgaaagcatcattggagcttaaacgcttcccctggcgccaatttttcgagctgtgcggagctctgcacaccagtcaaaccgctatgagcaggcggttgcattactaccaatcacacgggcatacaactatttttatccaattgcgagccaaacgtgctcaaacctccagtagatctggaacggactggtaattgctaggtctgtggagacagattggaacacgacccagattttgggcgtagaaaagggagcagtaagcggattggccaatcacgtgaagggacttttgaggcgggaatctctccaaccacgagcttttcagcatcaacaacaagcgtgatcaaagctttgccctataatacatgtacatgtattgtagtgatggggacgtaaacgacgttaacttttacctatcatatagtatatgctgtatgataggtttttggcgaattttgctgttttgcaatggctagtgtaaacgtgtgctagtcataactatgcatctggtgtttaaatgacgaaattcgtactatatcaaaattacagctcaacttttgaacctatgatatagattacgccgaatgatggttttgagctaacgtcgtttacgttcccatcactaacaattcattgtattgtgcaggctctcgagaaaagaagagagagagagaaaaaaacacgcacaggtacagatacagaggagagtgtcgtatccgatggccactggagtacatgagcatgtatttcgacctgtgcgtatcaaggtattaattcatggacttcaaattataagttatttaatgtcattatactgtctgaattaattggagagtgccacgacccctcagtgtccataagttgtgatcaccttgccatgtgagagctgtctagatggaagctcagttcctgcgttaaatactgtaacgagcttcttatcttgcccagcacgtggggcagatcgtattgcgggaactggaagttgactccgtgctggccgacagcagctaaccgagctactgcgccggatcgtccgtacacacacgaacgtatccaattttattaaggaggctagattactcaatagtcctcagccaactcgtagctatcagcccacagccgacaactagagctaactacactcagtcaatacaaagagagttcacccacgcacgcgagctactaaccctccagtagcagcggagcgcccgtcgacactccaccaccacctgtccgtcactcgtccagaaggagctgtcgcccccagcaagagctttcgccctcgtacttcgttcagcaagagctttcgccctcgtacttcgttcagcaagagctttcgccctcgttcgttgtctggcaacccgtcaccaggccacccaactcgtaagtgctcgcttgctccaagcgcgctaaacctcaaccgcttgcgcctcaccgcgcaaatttccgactccccgtcctcactcgttcgccaccgctcgttcttctccagcccgacccttcagcttcgagatcttcttcgtcagccactcccagccgtccgctccggctgccactgctctcggagcgaccgttcgctgccaagatcgcgttcgtgcggctctccgcacccaccgtcgtctggatctcgcgacccgccaccgcgcacccatgccagccgctctcgtccgccatgccccactcgtcgcccgactcgtgcgaccagctaccgctgctcgcctccgtggtcaccatgccgtgaccgccatctgcccatgtcctgttacaatacctacagtacttgaagtattcttctacgtcagagtactgtgtgaatacttccgcggcgaagaataaaactgtcggcccagcctgagaagaaaaattaactgaggcgtttagttttttttccctcgttgtccgctggcacagatggtgaggctgtttactcttagaaaaaaatcagtacagaggaaaggatcgcaagcaatgcatacggatgtggtttaccaagccgaggacatactcgaaattgtttataatttttaaacagtattttaaaaaatgtgactgaatggcttactttcctttatttctctgctctagtccaccataatgttggtgatgttcataatctccctttatatattctgatttattaatgtgtcctaactacggtgtatgtcttgcatgggggggctcttttctagcggttgcatgtctccaatttggaaagaagttagcgacacgttcgttgaacgaacgtgtcgctaacttctttccatcgtcacagatggtcgagtacatgtagtttactctgaaaataatactcgtatcagtacaaaaagtgcatatagaaccgaatgcagccatttcaaaaccgtatctctaattttcttgtaattaatatattaataaagaagagcgtcaggccagcattattttatccgggggggggggggggggtcagcatttcacccaaccatccctccatcgaaatggataataaagaattgtagtttctggaggcccttcgagttcgtacttaaccccttggttcccgacgtcgtaagttacgactttgccgaatctcaatgtcgtataatacgacatagctcgattaacaatagcatttggctcgaaacgagattgctatactttaatcaagtttattttcgtcggcaaaagtataagcaagagaagtaaaaatcagaattgcacaaacacacggatatagagctgtcatcagagatgggttgtgcataagccggggccggctaatggggcattttgtatagagaaagacgaacgtccccttttaaggtttgcgcgagtgcccactttcaagcaaacacaacatcgaccttgaaggggagagtaaggcgtatgcggctgtcaagagctcccacgagctcgtagaatagcttctaaacgcccgtacacacaataaacaagaaaatgataaaatcatggatgaaatggcgcctaaataactctccaagggttgtagctgctatttcctcgagtttaggtgccgagtacacgtaagtaagaataatcggaagtagactatgtctgccgagacttctaacacgaagaaatatttatctgcagccttataacaactgtacggtgtagctggttttggcagcggcagtgttgaagcgtatttcgcgccacgtaaatgccggattggaagcaagggcatggagtagtgtgtaaataaccttgatcgtgcgtatatcccacaaagacctctcccaataattaaactaagatgacgagagtatcctactactaaccaacttaacccctctaaccccgtattctgtatcctacagaataagcattgtcacaggacataatatccagcaaacttgtcctctctttcgaacttcgcatatggatgtttgtatagccggtattgtgcacatcttcctgttagattagcgatgggaagataaacggggtttattccgcggtaatagacggacgagtataaaccaccaacaggtttgaaacttcgggtggaagcctaaaaccgccgcgtttcagccactcgtactttccttcattccaaaactgcgctgttcaagacgtcgcaatgcaagctttgttggggcctgtcgagcgcgcccaagtggccaaggaccatggccgaagacgatcatgatgagtgccattgtgatctacaggtaagcgtgagcgtgtactttgctctgtaacattgtactagtggtatattgattctacgttgcgatgttgattaccagacctggtgatccgacccagacgaagctatgagctctcgagtgtggcccgattggcagatcgattgcggagtcagcgcacaacctcatcggttcctacgaagccggctacagccgggtctaccgctatattgtagctgatgaagtggctactcaagaggctacagaagaagcgctccgcatggtgtggctacaccggagactaaagaagaagcggtagatgctacgacggatgctacagaagaagctctccgcgtgatgaggttacaccggagattacagaagaagggacagaggctacgacggaggctaccgatgaaagcggcaggaatggagcggcagtgccggaggctacagagcaaagcggagactgccaatatggcgaagatgacccacggctggcgcgaacattgaagagcgtgcgcatgtaaaggaagaagtagacgttggcatgaatatcatatattgtcctgtttcgtacatgtgtagtgcgtgtcattacgggctattgagcatgcaagctccctggtgttgttagagagacaatcgtaacaagcttgttaggtgggctaaagaaatctaatgatgcgctaatgtcaagcacaaggaagaattcgcccagttcctcttcactacgtcagttaggaacagggcgatttctttctccgcgtttatcgcgacgtgccgaagatgggtggctggagccgaagtatgatgccttagcatccctgcaaggtattaccatgtagcaggttttgagcgtgctctacgctcgccacgaccaatagaagctcgccatttcggcatatggtggatacattgagcatgttttgttcactttcgtagctgttctgtgcacaatgtacccccagcgcttgaccgcaagttgcgaaagggcttccaacagcaaatctttgacaggttttgaagtatactttaatcaagtctaatgcttattctgtaggatacagaataacgtctggggctaaaagggttaagcacgacgtatacttcggtatcgccgggaacgacggaggtctagctcgtacgcgtgtcgtgtacgaggcgatttctatagtacgcgaagcccgagtgccgctaccggtgcggccaccctcgagagcagcatcaatatacctgctgcgaattagaataaccgtgctaggcttaaccttttctaggaacggtaaaacgaagcaatttcggtattgcttcagcgttccggattgagaaacgccgtcggtgtaggccgttgcctcggcaacaacactctatagaaatgggcgagctgtagggcagatatcataaagctgacaaacaaagcgaagaagtgaagctgcttctacggttatagaactgctttagcactgacatacaaagtaagttagcactccaagtacccctttgttggttgtagcgattacccttttttcttgaatgggatacagttccccattacctgacctgtgcataagtgagagggaaaatgttttgattgggtatatattgatgatttggtaattacaacctcgcagtcatctgtcaagatggatgttttgtgtagttcgccaatcctattgatccaccatctgggattagtatgcactcgatctacgttcgatgtcgtaagttccggcgtacttcgcgtcgttttcgactgttatgtcgtaagttccccccatagatctctacaatcttatatgtctgatggggcttctcttgttacggacagggtgtgccaatacaaactcgtagttacttttttcgttgtatgttacgacatacagtaccgtagattacgtgtttcggtgcctaaatcctgggaaccaaggggttaacgtattttcgttcaatgaaatatttgtcattttgggggcgtgacagacagataagaaactcggttaagtgagagaaagccaggtacagacaacgacggataaatacggcaacgcaaaacccggcacatatctgttgtactttttacaattttacaataagtaattcagatagtcaatcagtttcgagatttacacttgacatttgcattccatatggttttaagtactttctctaaatttgtgtgtactttatgctccgttacgtgtattttatgtcattgccttgtacaatctctatcgttcccgacagagaattctggcacatttactatggaggatgccattcagttatgccggatttatccgtcgttgtgtatcgttgtacttgacctggcggcgtatatttaggctcttatttcggagcctgctcgaagctgcgtctaagaaaactcggttaacaaagtaagagagagggaatgtccagagcaaaattcaacttgtatctaacgctttaaccacatattgagtacaatactagctcaccaagtgcctattgtcactacactggtaccttgaacgatgctgtgccgtcattatgctacagatctacaccatttctcaggcaaaatggttgctttctcaaccaaagtggtgcgggaaggtctcgcgcaacatactattgcgacgaaaagggacatttttcaaccaaagtggtttacagctgtttgtttcccaagcaaccaaccatatgaggctaaaacggaccagtccacgtcttgggcttggtctgtaagaatcaaaagttgctatttttcgacgcaaaaaaacttagttataatgcccacgtcacgtagatcatgatagactcctcaaatacattcacaaggctgttctaagctgtgttttgacttcttcaaaatggctctaaatcctcgatgattgtgaaaccactttgcttgggaacgatttacgacagaaccactttgcttgaaaatacctgggaaaagtgatatgaggtttttcccgaaaaatgatttgaaccactttggttgggaaaccaaccagtctgcctgggaaatggtgtacatgtacatgtagatagtgatgcctccgaggctacagtaatctgcccgagtaaggaacgcctgatatatataaagacgcagaatatataaattgatgttaagttgagtatacttttccaatgtactgatttagttatttcaaaatgaactgaagagcagcattacctacgagtccggaatgattccaacagtggcgtatggtcgaagcactaacctttgaccaggcatcctcgcaccacaacagcgctgtcaactggtcgacctcgtagggattatgtagcccttcaccaagccggtctagagcctgcatcatcttaagtgaggcggagacacttggacggtgtggacttcatgggtggagtgggggaggaggtgggcttgtggggcgaggtgcaaaagcaaaagtgcgagtctacccctacggtacatatagtttgaagtctagtaagatcgctaaatgcgcgccatttttcaaacgagggtggagagctgatgattggcactggatttttcatcttagtacctcagtaccttgcagtaccttgcacatcccctatcgccacatcgactggaaaataaaattaaatatgtgaggctattagttgtacacccgttccgaattcgggatgaattctgtattgtttgtactctatttgtacaggcttgatcccatcgatccgatgccctgctgagatgggactctttttgtagtgcatgggttcatgcaaacatgagatggggccgattaataatgctgcatcctagatagtcggcaatttttattttcaagagagcccgtgctgctgttgatgctgggcgtggtaatctcgcacggggtctcgacactgcgaaggcttcccagggctctcaggctaagtgtccacaactcggtaaaacatcgagtgtccttcgtcgccaaccaaccaactgaccaacctgccgaagtttcaacgaattctcagtttgcaatttgctaaacgcgtctccaacgaccatcgacctcgacaacttgactgaccatgcgtgtcttgtccttgctgactgtgatcgccctcgtctccagctgcgaagctgctacctcggccacgacaggcgtcgtcaagacggacattactttcttgtctcgcgcccttactgctgagtaccaacccaagagatccctgcgccagtatgatgaagacgaattagcgactctcgactccgaagacgaagagagagctggcaccagccagaagatggaggaattggtggagaagttcggacacctgggcttcactacaaggggtttcgatacgccagttcgcagctgacacgaaagctgttgcccaactgtacccaaaaggaaaaggcttgagcaaggagacactgcagcagttggcgcttgttgaacacatgagggccacggatatcgaactaaaaatgtccaaggaaactggtgatagtatgcgcagggaaatcgagcactttgatgatgtcccagtgctggaatcccacacgggtcgcgagttccaacgctacgatgaccaagaccgtcgttttctgtcgtgcattgtggcctccagagccgacggggaaggtgaaggcgaagttcttctcatttcgagctcaaacccaggcaaaagagactgggtgttgcctaagggaggctgggaccacggcgagaccgttgagacggctgcgtggcgcgagctcatcgaagaaggaggggtacggtgatatcgttttccgtcttgtcagtgatggcttcgtattaaccgattggtgtgcaggtggagggaagcgttcggttttacttgaatcctattactgagggcgacaaggtctactatcctttcaggatggacgcgacgacggtgtacgaccagtgggctgaaagcatgcgctaccgcatctgggtacgtccggaattcccccccccccccttcttcttgggtatgcgtggaacagctcatcgaactgtgcaatgctttattattgctcgacgattgacttaccgtgcaggtttcctacgccgacgcggaaaaactgctttcgaaacgtcctgaaatgcttaaagtgttgaggactgtgcgcagtgcagaggagtaagtcgcggagaacgcccgcctcctccagggcttcattttgagcttagaatctgacacactcgaagcgataccggtaatagagaagttccacaacaacttgccgatttcctaaccattttttctgtcacaattcccattgcaaaccctcatcttaaagcactgtactaacgttactggtgtacgtaagtactacgtagttggggacgaagtccccacttataatcacctctcactcctctttactctatttcttacctctctttacttattaatacctctcttaatctgatacatgaacggttagggtttacatccataaaaccttggttgaagcaccctctctagatccatagaagcgccttactgcgtaaaaactggagtgacccggggggacacgatttagcctcgacgataaacgctaatcaaacaggcaacgggaagcgaatcgcgggtttagataaattgctacactttagatcgcaccgagcgcaaaaaaaacgccaccaagtcctcggcttcactctgatttagagcgccaagtcagcgcttgcatccattactacgagtgagttagtgctgggaagcctgcatggatacgtgctacgcagagctcaccatgtcccaatactctagctcatttagcgatagcctgtagcctacaggatagctcctggcagtgatgcaggtggcctccttataccctggggtcccacaccacgcactaatagtatattaatacgcaactagctccaagccgcaacgacgcgctgccctgctggtcgctgggccctcctacgcggacatgcttcacgggcaccccgcgcgggtttgctttggctatgctcctcgcaaccacttgctgccgatagaatagagaatcttgcgatagtgtaacatttttaaattgtgtaaagtgatatggtataagtgatatggtagcactagatcgggagccgagatgctgtattgatgagtacgctggaaaatcgaaactgaatattatagcttttaacaacaactatcccttgctacatgtatttgctttgggctgtcggctaccactaattgatcttgaaccactggtgctgcagttcacccttgcggttaaccgcgatctagggtttcgcgagatatagtccagcatcattagtcttgctgctggtgtgtaattgccgttgattatcttgacctcgcgatagatagtaacgttatttgctgataatgaagacttcatcatgcagctccaccagtgttgctaattgcttattggtttgatgacctgcatcggttaaactgagaatctaaattacaacggtcgcgaacacgcccttagccctaagtttgcttcactacactacaaaaaatggtcatggtgattgataagagttattggatcaattagagggtggggacgtcggcctgaagtggagattccactgcagggtgtcggccccctaagcaactcaacggagcaatgcgactgaggtgctccattactagtaatagtgaataatgctttcgacaacttgtacacgtaggaaactcgagggaagctggtgtcttggtaacattcctggattgcctgctcgctctggggaggattgccaacggagtaatgggaatctatctgatggttaaaaaaaaacgtttgagtgctttgatgcactcaaacgttttttgagctatgttatctagaatttagatttttgttacagaatacctatgtctagattctagactgcaatcccagaacgtgtctaaatccaccccaacaaacaacttcagaccctcaacttacaactgcatcgtggcaacatggacgagggcgagttcctgcgcctgctagagcgctaccccgtggtgcgcaagaagacccactgccgcgtgcaatggaacgacatggtgcgtccgcgtcttggcttcttctttttacccccatgactgcaatcgcggcgctctatctcccgctacacccgttgcaatgcagttatctaactctgtagtcatgcaacatcttttagtatgacgacgagccggctgcgcagcccgcgagctctggtatctttatccctgcgggtcacgagagcgccatcaaacccacggactcggtggaggacgcgctggagaaattcctggcgccctatttctcgtcacaggaggcggccaagatccagcgacaactcgagaaggtgctgacgctcattctaatgccactagctgccaagttgcagggctttaagctgacccgatatactttattgttgttattgttgttgttgcaggctcagattgactttgtgtcgagtttgaacctggaggacgtgaacgagctgtgcgcacagttcgtggcgaccaagtagagggtggacggatttggtgcaggtaagagcttggcaaatatggtctatattatctgtggacaaggcatgcgtctgtcttctttgcgttgttgtgtgctgacgagagggaactatacgtgtagctgctgggatagctggtggcgctgctcagggggaaagacaacgagttgcgagtgagataaaaggcaatgcattgtggaaaactggaaattgggctaacaaacctgtcggaagctgcgggactgagctgggtccaagaaaggcgacgcactccaggagataaccagcgtgcgcagctcatccgtagaagtctcgaacgaaatgaggtgcaacagcgcctcctgacagcagcaccggaccagcaaaaaacatcagtactcaagcaaactccaccaacaccaacagcttcccaacgtacgatgtgctggtactccgcttcgaacgtcgccagctcctgactcatcatctgcaggtagtccaccggcctcagctccgtagcttcgatctgctgctcctcttcttcatttccatcgcccagcactttatcaacacaccaaacaccaacacaacatcagctctccagctccagacctacctccatcccaataaccaacgcaccaatctccctcgcttgctcctgcagcgcgtacatctgctccaggagctcctcgaagccgcccgacagctcctgcacctgctcgtacaggtcctccgccagccacggatccatcgccgcattgccaaccagtccagccagcaacacgtccctctcgctgttgttgacagcctgcgcgtctcgaaccgccagcagcgccgactggaacccttcgatcagcgcgatgccctcgcgctcccggccgtaccaggccgcccctttctcctgcatcgcagtgaacagccttgcaactcgcttcgacctagtatcacccgcacgcaacgcctccttctgctcgtttgcatcgcccgcagcactcgccgccttcttgctcttcttcttggccatcgttgacgtaattcgtttttgacaaaatggctacactactcaatttggtcaatcagtcaggacttctgaaagtaagaattaagacggtcctaaacgctagatttagaaagttttagcttgcagataagcaatattctggactgcatccagtacaagtgtgctctcggctagcaagcattacagcataaaacaactttggatcttactccgttacccagcaactaccaaaatggtcgggcaggaggtcgatcggtgcttgctcgtgggtcctcagtgagaacctgtaaattgtagcgacccttgtggcctgttgtttagcttaggacgaggactacctccttgagtcgggaggtggttggagagtcccgagctaacagcccacgacacgaaacagcagacgtacgagcacattggaagaattggggactcactaaagccaagtgacaaaaaatgctagagctacgtgcctgtacccacgttttggtagctctaacctctgtacacttaacgtctttgttgttgcaaacacttcttggagcagattaaggctgtgtaaataaaataaatgtaattcgcatacagttagaagccccagttgctaacctctgtgttgctgttgtccacaccgtcggtgcgatggtgccgcagggtcgcttctgatgttgccgggatgaccatgttcttcgatagtatgggaactttagcagtggttgcaatgttccgctctaacacagacagctctcttcctgtgccgaacttacctgcgcctttcttacgagacgcacgttgctccttaccgactgcacgccgtgttttaatatctggttcaaacaccacggcaagcgggggtgggggtacgagaaatcgattaatgtggtgaaagtcagaagggagcaaggccttttgatcgtggtcaagttgtttgagtcgatgcacgcaaggtagtccggtgcttcgcgaaaatatcttggtgcacttgtggatgatattcccggcgataatttccaagcatttcagaagcggaaacgaatgaataatcttgccaacgttcacgaagagagggttgcccagcagcttcacatgccctctcgtcatctcgtcggaaacggcatccttgtgttccttgatggacttacgccaccacttggggaaatgagtttgttgaaccagttcgccatatttttagagcacaggaataagacgcgaggccttcagatacactgcatgtaccaaacagtgggaataggcacgtagctctagcatttttgtcacgttgctttaggcccgaagaattggttctacaatgtaatagtacatgtggtgtcttccagatctggcgtgccaatttgaccaaatcgcaaattccaagtcaaactcctgaccaaattgcaatttccccttgtcgaaaacaacacacatttttgaccaattcgacgggtacactgtaccccgccacgtacttgtgaacgaggagctcatttgccgacgccaccatgcgtgccctgcggctgctcttcctgtgcgcgctgctgctcgccgcgacgctgctgtgctgtacccacgcctccgatgccgatgccgacgccgacgcccccaacacgccggagcccacgtccagcgccagcgcgcgggacaacgaccccaccatccagcaggtgcgcggcctgcgcaacgccggcatgaagctcaacgacgccaaagacttcacgggcgccatcgagaagctgcgcggcgccatcacgctgctgcacgagcgcgtgtttggcgagggccgccacgccgtgtcggacccggccgagatctcgcaggacgcggcgctgtacgcgcagatcctgaacgactacgggtccgtgctcatccgcgccaagcagtacgacgaggccatcgaggtgctcgaggactcggtggccatggtggacaagatctacggggacagccacccgtcgctgggcctgtcgctgcgcagcctggcggacgcctacatggccaaggagaagtaccagaaggctattaacaagtacaagacgctgcgcaaacatgtcaaaaaggggctgggagtgacccacgaagcgtacattgaggcgtcgttgaggatcgcagaggggtacaagaagctgggcaagaagaagaagaacctcaaggtgctgaaggacgctgtgaaggcccagggaggcgagatcaatggactcaccacgggtatcgccgagctgtatatggagctgtccacggctcacgtggcggtgaacgagatcgacgacgcattgagagcggcggagacggcgagcgctgttttcttgcagagagacggagaggacacgctcacgtacgccttcagcttgaacgcgctggcgggcgtcaagatgcgccagaagaaggtggacgacgccattgaactgctcgagcgcgcgcacaagatcgcggtcaagatttacggagacaacgaccccattacgcaggccagcgccaagaccctgagggaggtgaaggagtacaaactggacttgcacgcgcagaaggacgagctttagagacagagacgaagagagaagatagttgggggttggagttgttgtaagtaagctctgtaatgcagctctaccatcctagcttggtgaacttgaaggtgaagtcgacgcctgttgcagtatcaatacatcagtgctcgggtcctaacagcagtaaggtaagtaaacgtacgtaccgaagtgtactactcggaagcacagcgtgatcatcatccagacttgctcaaaatggaccacttgtgcgtctccagtacgaacgcgagttggtacagcgctcgcatcccgcagttcctcttgatcaccaccagaagcagcacgaaagacacaatctggagaatcccgaacacaaatacggggagcacagttgagccagcgttgttttgagtgactgcagccatctcggagtgaaactgctgcgcacttgggagatgcaccattaccaggatgtaacttgtgtagaagaaggggataaccgcttcaaggtaggaagggcctccgaaaatagcattgtcaataacattatttcagaaaataacaataaattacgcatttcggcgggttcagccatctaccgtgataatttattgatgtgctttgtgatattacataatttatgacagttacctttatataataatgttagcgttttaccagccatcttctcgcttccagtcgttcagaagaactgaaatcactggttgtctgcgttgctagttgcagctcatttggtagcgctcacctttcaattttcacttctcaagcctccaagacctcatccagcatggtttgcgctatccgcccccctcgccctacgtacacgaactcccaagtctcggggttttacttccgcccgtgtcgcgacgagaacgacgaggtgattctcgagtatttccgttgccgttgcggcacggttcggaagcaaatccataggaacgggtactccaacctgatgcaacatatcaggcgggagcaccctgactacgagaccgtcatgctcgacgctacgacggcggagacaggctccctcgtggacttgtccgccattcgacgctcaacctccacggctggatggtttggattgtcatgtgcaacctgccactctctttttgtgagagccgagaagctcggcggtacgtgtatgcataaggtcattgtgtttacattactacggaaactaacaactttactttatggatgttattcagctactccagtctggaccccatctcggaggaaacgctgcgggctggcatggacggggtcgtcgtcgccgtcgagcgttcgattgcgtcggagctcccagcacgcttcggcatcatgctcgacggctggacacacgcatctgagcactacatcgccgtgttcgcgtgctatgaggtgaacggctgtcccaagacaacgctactcagcatggccccgctgctggacgcgctggacgacgatctctccgcgcagggccatctcgagtttctagcgaccatgctgccgcgcgattacggcgtacagctgacgcagtgtcgcttcctcgtagctgacaactgcgccgtaaaccggcggctggcaactcttatgagtatgccgcttgttggttgcgcaagccaccgcctgaaccttgctgttcagacggacatggcgtcgcatgaggaggacctggctgctgtgcaggcgctcatggtaaattgcgtactctcacccaatctgccaaactacggtaagcgccaatgtgtgtcaatatgtctctaacacaatttgtgtacttttgtaaattttttacaaaataggttgaaaacgccacttcggcctgtcattcgccaggacacgcgctggagctctacgttcgagatggtacggcgctacctccagctcctcgagtttcttgacgccgaagacgacgacctcatggacctgctgccgccgccggcgatgaacaagcgactgcgggcattgtaccaggagctgtgcgacatcgagtcggtctcgaaggcccttcaaggccacgacgtcgacctgctggacgttcgcgagtggttcgacgagctgatcgctgtcaagccacaatatgggcgctacattggtaagtttataactgttgaatttgtgtttaatattttcactaacaattgtataatggtttttattttgcagggcctcgggccaacattgtgcacagcccagattttgaggctgggtgtgtacgcgttctccacgggaaggcgcagcggctgacgcgtgctgaaaaggtcgctttgcagcccttcgaagctgccagaccgggcgacgcggccgcgagtgaggaggaggaggatccagccacgtcgttcgtggagcgtcttcggaagcgccggcggcttgcacaggaccgtgtcaagtatgagcagctgaagagcatcccacccacgtcgaacgtggtggaacgcttcttcagcattgctcgggtgacgtttggtcatcaacgacacggcctgctgccacgcacgcttgagacgattttgtttctccgccagaatcggtcgtactgggatgcaacgactgtggacaatttgagctagatgataagctaactggtgtcttgttaatagacttcatgctttttcataatggcattatttattgtagtacgttgggggcaatgccataatgtactgttgtattggtaggagcgtcaggggataatttattcagcaacgcccaacctactaaataaaaatgccatattcggaggccctactaggaggtgacgacgaggcattcgatcgtgaagaacgtctcaagtgaatagctcaggaatctcagtggctccgagtcgactggtactcgggtaccctctgcatcaccattactgggtgtgctcggatgaatttctttgctgcgcttcctggtacaaatgatacacagcgcggatgactttcgagtattctcgcgagatggaatgtccgcgacggtcggaggcgatacaacccctcgcgacttagacgctccattcagcttctttagaaggatgttatccgctgttggcagtcgatgcgggaaatgcgagaaagtatttatcccacttcgagtcggctgacccagcacttcggtgtttcgacacaggcagcacgacgcagccagcaagttattcagattgccaactcccggtattacagcctgtaaccttgctaagatgccattagttcggtggtgcaggccatacaacatgatcatcgtctgcgagagatccgtcataatgatggcggagattgcgagggccgacgtggcgctctgcatgcacgtagccacgtagatggcgttgaagaagtccacagtaaaaattaccagctccggcgtcatatcttccacgtgctttgtacatctcaacacaatattttttataacaaccaccatcaaaggcagcaacaaaattacaggaagctggaaattcgatccttcaacaaagcggaacaacacttcgtagatcggatacacgaacatcatcatgatctgtgcgtgtaagaagttcatgtactggatgagctgcttgcgttgtgcgaatagtttgcgcagcatttgagcgcccagtatgactcgaaacagaataatgtggatagtgttgtagactacgagaaaccgactgcggtcggtggtcacttgggttgctggcagcgcgccggcggtgtgcttgttgaatgaccagggtagtgagtggtggttgaggtctgagaccgtgatgcctttgactatgatgaagaggaaagagagttctggtgaaagagacccgagggtttctcggaacttctcctgcatgcgtgcagcctccttcgttggctgcggccagtgtagtcaagagtagtcaacgggggttttatggctcgaggtgctttcccctacaacaacacttgaacaacaagcatacaatctgttttctctcgaaagacacaagccattttagttgttttgctccctacttcgtgttataaagctactgtccaactcgaccctgcgagatctgcgtaggtgaagtgctacgagtgcaactcggtttctcctaggttgtgagcccaaggggcttaacgagtagcacgatggagtatggagcccttcaacagcaagggcaagcaccttagcagcaacaggtgcagcaacaagctcagcagcaaggccaggtgcctcagccgcagcaagttcaagtacctcagcagcagcaagcggtgcgaaaggtggctgcggctactaaggcgccaaagtatgatgaaaacggggggtttgatttgtatcgggcgcggctggagtcgtatctaaggcagcgagattgttggaatgctgtattggggactgagggtcctgacgctcagaatgctgaacgacaacgaatttacgaggagcggaacctgtttgcgcgagacacgttgctgtttggccttctcccgaaggatgcgaagaagatctgtaaactcgttcgagtgactgagatgtggactgcttttgagcgggacaaaacacgacgagactttgcaaatagcattcgcattcgtgctaaattgtatggagcgaagtatgccaaaggagtgaacatggataagtatttggaggatcttgaggactatcgccggcaactcgagaacatgaacgattccatcacagatgctgatatggcaagtatcattctgacgggggtggaaggaacccatcggaatgtgatgcggatgtttaaccgagacgccaatcctcccgacttggagcgtgtgctcaatactctgcggagtgaagctgaaatggatgaagctgaggaagatcagaatgacaacttcaagaagaagaagaagaagggagaaggcagtggcctgatcgggtcggttaaggggaaacaaccttggccaggcaagaagaagcataaggtcggtcctggcaagaaggctcgtagtggtggcacgtggaaggagactcgtgaatgccatttctgtcacaaggtgggtcatcttcgagctaattgtaagaagtggctagctgagcaacagggaaagaagcagaagaaggatgacagcgatgatgacgatgacagcgaagccggcgagcggtcgaagaagaatggctcgaagaagaagaagggccgaaagatcggcttcgtgggccggtggacgaagaacgtcgggacaattggaatgatgatgtgactgcgactccacctcaaatcctggcaacctcgtccggtgactatactgacgagtggatgctggacaccgggactgacgtgcatgtttgcatcaatgaggaggcattccagcgtgacttgcgggaagatgacaagtatttcaacgactggaaagggaggaaaggcagagctgacggcattggcttggtgcaagttcgggcaatgaatgtgttggacccgaatggatcggggtttatattgtcgttggaggaaacgcgtttctcccccaatggccctacaaatctgttgagtcaagaacttcttgagcttgatggttggattcctactactccgttcactcgtgttgtggcggagagggttacgtactttacgaacgacaagtacgacggagtgaagcttgttttcaagaagcgacgtggccattagtggctggatgcctccactgttacctcggacgctactatcggtgcagtggcgtcggcaccaaaggataacaagttgctcatgtggcacatgcgctttgcgcatcagaatgtaggagccatgaagaagatggttcggatgaacatggtggagggcatggagacacttacactggcggacttcaaagggcagtttcgcttcatagcctgtcagtgcgctaagcagaagcggatgtcttacaagcgccgagaaggaaaacgacagaaggagtgctatgcacgcctaatgtcggacgtgtgtcatgtgggagagctcaccccaggcgggaacacttactttcagcttatccaagatgaagcgtctcgctacaaatggcgttacctgttgagccacaaaagtgaagcagcgcagaatgtgaaggacttgattttgcgtctggaaagggaacatctcatcagagtcttttcgtgtgaccaagccaaggagtttgtaagcaaatcgctgcgggcgttccttaaccccttggacgcggagggttggaaattcaccttaacgtaagatgccagttgcgtgcctacaaccagttccgtgcctacttgttttagccaattagcatcttctccttgttaagctctcgtagtctattggtagatttttccagcgtcacatgcaatttccggtgatgagcctcctaggatttgcatagcatacaaaaatgctatcaaaaagaggcaggaaactggcagctcactccaaatcaacaagcttttcaaaacaataacaagaagttctgcaaaatttacatgaagtacataaattcagcccagtcgcgcagatttagcgggtgcaatcagatttcagaatggacaattcaatgaaaagttatgccacagcaagtccgcaagttcgaaggacggcacgaaactggcagaagaccttatgctgttctgaacagcataagaaacacttgatttcaatatacctctaaatccgcaaaaaggggatccgctgaggagggccctcatcgggagggccctcgtaatagagtcgacatttgggaaacagccgattgtgacaaacgcacatttgggtcattcgtaataggtgcatgtaccgaaatcgtcggcaacgctctgtggaaatgataccgttgccgacgatcatagctctactataaataagcatccgaggcgaagtttactttagactaccagcaaataataagagggattgagtgcttgccattttttcagatctcgttgtgctgatggtacgccctgctttcccagcgtctggctacgccgtgttctacctgcaagtttcccaagcgactattgatgagctctacctagaagcagagtctcggacctacagacctgtgtttcgagaagtaggcggagccgaagatgacatgttcagaagtcaatcgcgagttcagcgcatgacacctccccttcgacgtgtttccgctccctggaaatacgcaccgcagaatgctgagcagtacgcgttgcggggcgcccgcggccagacgcgccacacacagcgcagccagcgacggcatgctctgcggggcttcggccatgctaaggtggggggcggggaggcgcagcactggagctgcggggacccgagtcaagctggctctgccaagcgagggatcccaaatacctagcatatcggggattgaacggcacttggttgtccacagcctccttaaatcttgggttgacgccgctgttgtcggttgtaaagtcgcgcaacgttgccacggcctctcgagccgagtctcgcgtcatttcatgagcttccatcgcttcagagtcactatgcaacaaattatacgatctcgtggcagatacatgagccgccgtatcccgcatcaacacgagtaatttgtctcgtgctcctgccgagaagctgccagccacttgcgcacccaagcactcaataaccgcggcagcagactcagcaacaccatcggcattacgcttccgaacagccatcgccatagccgccagctctgccgacatcgcggctcgcgccacagagccacagagctgattgcgctgtcgtagaagcttggccagagcctgggcggccgccgactcgggcgcttgaactggggcgtcgcaggttctaccaacgcgcgagtcagtcgaagtgatagcagcgcgggctcgatgtgggtaatgagcgccatcttggcgctcgtctagcaccccgttgggcgctccctgcccttgctgtagctgggatgcccaggcgaagaaggcgcggtggacacgcatgagaggtgggagagtgctttatgaaccgagctctcgttttggtacatgtacctattacgaatgacccaaatgtgcgtttgtcacaatcggctgtttcccaaatgtcgactatattacgagggccctcccgatgagggccctccttagcggatcccgcaaaaagtgattatcgtcccttcccatatctagctttgatatcattggtccatctatctaaacgtggccatttgattgggcatcaataacatatgactatcagggtagatgaaataccacgcacaagcacgaaccatttttcagaaaaaatcaatcatcggttcccctcttgctgccgccactcattcttcattcggcgcagcaagagagaaagtggcatttcgggatgacatcggcgcggtggggctgcttccgtgcaagccccagacggacgagaggctcggtacgtgcgctaagtatcttggtatagatcccaaactaactagtgcgactatcgctttgaagcgcgagctacttgaagtctgattgtaagtaccgcggcgcaagcaatccctcctttcgtgctacttggtacgtgtgcgcacaacttctgctggttcaaatacatgctaaccacttgcgttgttactatttgctaacagaactgtatgcgtcatctttgcctagcgcgactgtgccgcgaggaatcgtcatgggcgtttggacgctagaggtatgcgttgcatcgttgggatgattgctgcggttggactaacctttgttgccttcagtaggcggtcgtggtaggatggggactcaagtatctccaacaggcgtcggttaccgtaatgtccatggcttgctgacgtggaaggtatactatatgcgctttatgctgacggaatggcttatactgattgagattggtttctgcttattgaaatgttttacgaagatgtacatggcgctggctgctgggacgacgacatgtatacatgaacgacagctcaagagcagcatcacctccggtggcaacgtgataaatttttgagtgctgcccaagaacggacggcactgaagacaagctgaagaggagcctgctgctcatagtgaggtatcgaccgccactgaagtaaggaatgttgtgggcttcaagttttacattcaagatgagaggacgccgatttcgcgttgaaggtatgggtgaaagttgatttttgcttgaatgctgacttggtccgcttacaagtttgactttatgcagacaggatcaggacaggatgccttctcgcttcgaacccaagtcacatcctccacaaccgtagcaatgcgagtcacactatagtgcaggaaactggcaagtgaatatagttcctctcgtacattacattgcaatatgcttgttctcatgttgctcctatcttgctcacacacataattcatactgttcgactgatcgaagtgtggtgctatctctgcttcaatgtcggtgtgcgaagacaacatcaacttactctgtagttgctcttcttcttttgcattgtttggtagcgttggagcgcgctgtttgtaatgtagtgtgggtcctagagggcttatcacttgtagcaaccatcaaggcgacaataccatagcatccattgtgttacatgtaagagagagcggaatgtgtacccgttcaggcgcaacgtttctctaaatatcagtattgcatagaacgcactgtgagtagctcattggaggatttttatccgcagatcacaccagtcccttctagcggaataattaccagggagcttagcaacaaattgtgtgaagaaaagtcaaatttatactcgcgttcactatgtcatactgagtctcatacgatttcttatgccgtccaggacggtttaagcgttttttaatgccgtccatgtcacccctccgcgtccaaggggttaggctccatggtattgagctgctcactaccaatgcgtacacaccagaggaaaactgtctcgtcgagaagttgaatggtaccctgatcagcaaggtgcgagcggtcaatgaagcagctggattgccgttctgtctatggggagaagtactgctgtacgttgtggacgttgataacatgagtgctacgaaggcattgcatggcacgaccccgcacgagaagttgttcggaagcaagcccgaagtgaaggacttgcatgtgtgtggatccgttgtgtttcattacatcccgaagaagaaacgccacagtaaactggacatgcgagctgatcgagggatatttcttgggtatgcgaagacgtctctcggctatcgcattctggatctgtgcacagggaatctaattgagcgacgagatgttgtttttcatgaggatatggcagcagacccgaagtatgtgcgcgacttgattaataagcggtactttggggaggagatcgaaatgccagagcacattgactttgtgtcgctgccggtcagccgtgttcacttaccattggacgagtacgatgagagttccgaggtgtgaatctgttggctctggcgaaaatggtgatgacgatgaagagttttatgacacggacgatggtatggccggagcatttgtcgatgaagacgtcgatgccgacagtagtgatgatgatagcagtggtgacagtgacagtgacagcgacttcagtgggagtaacgctgaagcaatggaagtcgatgtcgctgctgatcatgaagacaataccggtgacgaagaagttgaagatgaccactccggggatcagggcgtaactttgagtggtggtcgtacgccggtggtcagatccagcgggagttctcgtgctagtgggggttctcgtgctagtgggagttcgagcgctactggaagtgctggaccaagtcctgcgactgcaccagcggcttctgtgcgtagatcgggccgtgtgcgtcgacctaatagccggtatgactctcgcacatttgtgttggcacagacgttgatccagtgcatgatgatcgctactgtgtgcgacttgttgaacccgacctctgtccaagaggcacttaactctgagtatgctgctcagtggaagcgggcaatggatgccgagtacgagtcgcatatgcaccaccagacctgggtactagttccaagaccacagccgacaagagacaaaccggtgaacattttatcgtcgaagttggtgttggcgctaaaacgaaacgaaaagggagaagttgagcggcacaaggcaagactggcaatcaaagggcatcgacagaagtacggattggactatctggagacgtactctcctgtcgtgcgtattgaatcggtgctgcttgtgttgctactagcgctactgtacggcttggactgcagacatgtagactttgttacggcgtttctaaacggtgtactgcaaggcgttgagattttcatggagcagcccgagggctacgacgatggctctgggagagtttgcaaactgttgaaaggtctttacggcctgaagcaggcctctcgaatatggaacaacaccttgcacaagcatttgattgcaattggcttcaaacagtgcacgtttgatgctggagtatactggaaggagggagatcacaagaagattttccttacagtgtacgtcgacgatattgtaattgccgccgattcgcgtgacattgacaaggtagtgaaggcactaggcaggaagtttaagttgaaggacttgggccgagtgcggcacctgctaggaatggagattataggaaaaaccgagttgcactcgtagcacttcgcctacgcagatctcgcagggtcgagttgaacagtagctttataacacgaagtaggaagcaaaacaactaaaatggcgtgtgtcttccgagagaaaacagattgcatacttgttgttcaagtgttgttgtaggggaaagcacctcgagccataaaacccccgttgactactcttaactacactggccgcagccaacgaaggaggctgcacgcatgcaggagaagttccgagaaaccctcgggtctctttcaccagaactctctttcctcttcatcatagtcaaaggcatcacggtctcagacctcaaccaccactcactaccctggtcattcaacaagcacaccgccggcgcgctgccagcaacccaagtgaccaccgaccgcagtcggtttctcgtactcccacttcactttggttgcttagcgccctcaacccccaagcacacggtaaaaaaaaccttcatgcaattcacccgaggtagaatgcagcgcatgcatcccttgtctcactcgagctaggttgccgcagcacacctattcgtcactcatctcaatgtccgacgcgcagtcagacgctctggccgttgtcgctccagcactgccttcaacttccgacaaagctttccgtacatcttccaggttgagctgatcacgcagtcgctcaaacacgcacggacccaatgctttcgtaaagatgtcagcaatattttcggtggtcggcacgtacttcaactctaaacgaccacggtccacccactcagcaatagaacgcgtcttctttgcctaatgtttctgctcctgcgagttcccattgttttccacttccttgatggtgctctggttgtcgcagtacaaggttgccaccgcttgctgcttaattccaagctctttcaacatcttctgagcccacttgatctctttcgtgcatttatgcgcagcaatcaattccgaagcgcaggtatcatccgcaacggtaccttgcttcttgctttgccaatgccacacatttccattcagacgtagcgcccagccacttacagatctgctcgtctccggacatccagcatggtcagcatctgcgaacgcatccagcttcacaccgtccttgctgatgtcctcatatcgatagaccagtccgatgtgcttagtatcacgcagataccgcagcacgcgctgagcttgacggaagttttccttcgtgtacgcactcccataccttcccaacgaccgcactgcattagccaaatccggcctcgtgcagtggacaagatactgtagggagccaaccatctcacgaaatggcaacgctggatcattgatcagcttgcgattcttctctacacgcattatcggctcattatgcatttgcagagaccgaacagatttggcatcggccattcgaaacttctgcagcatacgttcaatgtacgcggtctggaaatgcacaagatcttgccgggcacgaaattagtctccattcctagcaggtgccgcactcggcccaagtccttcaacttaaacttcctgcctagtgccttcactaccttgtcaatgtcacgcgaatcggcggcaattacaatatcgtcgacgtacactgtaaggaaaatcttcttgtgatctccctccttccagtatactccagcatcaaacgtgcactgtttgaagccaattgcaatcaaatgcttgtgcaaggtgttgttccatattcgagaggcctgcttcaggccgtaaagacctttcaacagtttgcaaactctcccagagccatcgtcgtagccctcgggctgctccatgaaaatctcaacgccttgcagtacaccgtttagaaacgccgtaacaaagtctacatgtctgcagtccaagccgtacagtagcgctagtagcaacacaagcagcaccgattcaatacgcacgacaggagagtacgtctccagatagtccaatccgtacttctgtcgatgccctttgattgccagtcttgccttgtgccgctcaacttctcccttttcgtttcgttttagcgccaacaccaacttcgacgataaaatgttcaccggtttgtctcttgtcggctgtggtcttggaactagtacccaggtctggtggtgcatatgcgactcgtactcggcatccattgcccgcttccactgagcagcatactcagagttaagtgcctcttggacagaggtcgggttcaacaagtcgcacacagtagcgatcatcatgcactggatcaacgtctgtgccaacacaaatgtgcgagagtcataccggctattaggtcgacgcacacggcccgatctacgcacagaagccgctggtgcagtcgcaggacttggtccagcacttccagtagcgctcgaactcccactagcacgagaacccccactagcacgagaactcccgctggatctgaccaccggcgtacgaccaccactcaaagttacgccctgatccccggagtggtcatcttcaacttcttcgtcaccggtattgtcttcatgatcagcagcgacatcgacttccattgcttcagcgttactcccactgaagtcactgtcactgtcaccactgctatcatcatcactactgtcggcagtccggctcaactcatgaatcagctcgatcaactgcaaccatgctagaagtgcccccgtcctttgtgagattcaccgcaatactcccactacaaacttgcacttgtgttcggcccattcagcacagtactcccactgaactactaaaacgacactctcagtgtcattagatgaacaaatgtaaagcaacccgagctttgcaaacaattcactctacgaaagaccgctcgcaccaatccaccactcgactttccgcaaaagactattgaatccgcaattcaaagcggtattcgagtttcttgttgcagctcaacacgtgttgctaatcgtaccaagcattaccgattcaacttccagaattagatcccggtgcacagatccagaaggcagcaacaaaatcactggaagctggaaattcgatccttcaacaaagcggaacaacacttcgtagatcggatacacgaacatcatcatgatctgtgcgtgtaagaagttcgtgtactggatgagctgcttgcgttgtgcgaatagttggcgcagcatttgagcgcccagtatgactcgaaacagaataatgtggataatgttgtagacaggagtcagcaccaatatgaggaatgggatggggaagatcgtgcccgccgagatggccatagcgcaggccgtgaagatgacagcgataccccccgatagcgatgtgagttggcgcgaagagatattgaagttgtcgatgaagtaaaccgcttcacctgtagatgtttgggcgattacaaagaccacgatagcgactcgtatccagaagccatagtttgcttgccatccgtctttggggtcgcaaagtggcagcgattcgaatagaaagaccagcgcagccatcgggagtggcgtccaaatgcacacgagcaacccgtggactagtgatgtcgactgtgcgtacgtctccaaggcgagtagtcggtggatggagtacttgccaccgtagtaactcaattgcagcttcttccaagcgtcaagtagctgcttggacctcagtgctttattcatttgagatcgagcctcgcaatgaagcctccaacgcttcgtcgctatcgataaaaatactgtgtccagttcagttgaactggtctaccaattctacggacgcatataccacgcatatacgtccaagacgactgtatttgtctcgtggagtgataacaccgcgcatacgagactcacattaagtcgccctcgcatcctggccacgcgttaatatttgattttgctgcgctgcttagtttgtggggcgtccttaatgagagcgtgtttgctcggatccactgaatactgtggatcagagtccggcttttcgcacacagttccatcacgaaagttcgttttaagctgaggtgcattacagtcatttaaagttcctaacgacctagaaaatgcccgaccctctgatgcttacagatcatctgagggtttgctagctaccgctactggtgccagcaaatgcgtaccagctaaggtgcgctacgacgagcggaggcccggcatccgtcctcctgatccgggtgagtgttcatccagtgatctacgtccgcttggaggggcgcgatgactgatgtccagcgcgaaggcaggcttgctacgtctgcagcagttacctgcgtgctcttcttggtgtccatggccaggttggctaatccgcccgccgtcttgttgaagtggcgtaaatgatgagaccaggaggacaccatcagtcgatccgctagtagccggcattgtgtatacagtccttgtaggtgtttggctcgaggcgttttccgcttccgtaattgcgtgagaatgagattactgtcaccgacgacgtgtactcccatcagcttgcacctagcagcataccgtagtccgttaagtagcccacgatcttcagcgatgttgttagtcgtcttggacgcgtaagagacgctagccatccacatcacccggggcgtgaacgtcgccccacccaattgcacaatgaccgttcccgcaccgcctggcccagggtttccgcgagatccaccgtcgaagaatagcaaagtgccttggcgccgacagtctggtgggggatatgtgccgtctccgccgagggcgttggcagcaccaagtggcaggcacgtgcagccgcaaccagaggcgaaggcgcattcatggccgtggtgttgatcctgattgtcaggtaggccgctcgaagcctgccatgaagtaccgcagccgcccgtgttgccgtcgcatcttctaccggatcccgatacaaacagtgccgtcgccatatcccttggagtgtagtcactactccgaggcgccaacactgattcaggatagtgtagatgtgcgtgcggatggagtctcgcgtggcttcggtgtcgtgtccgtgtaacgcgtccaatagcgaccacatgccgatcggtacgcacttcagttgaagtcgaaaagtggatgagagtcgttcggacgagtcgacaacaccaagtgccgtccacggcgcatagaaaactccccataggcaggtggccccctcacatgtccaaaacgtgtgtgaggtgttaaccgcaacctgcaggcactctgcaattgggcaccctggcagtctgcgcgttgagtcccaccaggtgaaggcttgaagtttaaatccaagcaagacctgttcactccaacctgtggctccactgatcttccgaatcgtttccaggtaactttagcaagagcgctggcaatctgcggatgttccaagctccacgcactggcccgtcctgcaacgttgcgcgcaccgtgtcttctgggcctggcaagcaccgctcgtatagacgtgtcgaggctgtttccacctcctttgtcctgtcgttaggcacaccatcctgttcagccgtgggtggggatggatgctccggatgttaacctcgttggctgtgaatgcgtttagcgctctcgttgccgcaggtcttgagcaaacctccaccgtgtgaatgggtcccaccgttgtgcttgccacgctgagtgatactttcgtcccggtggctggacccggcgtaggaatcactgtcagtggatggtcagctggcatagccgagatccgtagctccgttgtacagcttggagggtacacgagctcaggatagtgagcgaggatgtccagaaggagtcgacgtacttgacctgctgccctttggttaatcgtaattgtccgggtcgaacgtgggtccagtggacgatgtcgttcacgagacaaccgggtgcggtggtacggcaggcgagcgctgcataaccaagtgagtccggcgccttccacgggaaaaggtggcgaatttctgcatagggcagccactcaagacatggctgtccattctgggtgcgtagaatttgacgtggggtggctgtttctcctccggccaacaccaacaggtccaaaacacaatgatcactatcccaaagcagtacatcggggagagcttgatcaactatcccgtaaagctctctgaccgcctcctcgtgcttgcgggtgtatggttttaacccagctcggtggaccatgctggcgcctgctttccataacgtagcaccatcgcggaatccctggacaatacgatcgcttacacttagcagagcttgtggataggatatctccaatgacatggtcgatcaatgatccgttgagagcccactcggtgacggtcgacgccgccatcgccagcagttctgctcgcagatcgggcacggccagccctccgtcccgccggggcagaagggtaatgtccgcagcaatccatgatgtaactccggaaactctctccacaaactggccatgtaacacgaaattccgtatgcacttggaatattcctcgacaattgcagtggacgaccaaccatgcctaccgatgaacaacagcttaggaacgatcactgccgccgcaacgacagcgcgttgatccactgtgagagtgcgctggctggcccgccttactcgaatctgtagctgctgacccgcagtgtgccacgaatgacttgcctctgagcgacttcctgcttgaacgcctagatagcggcatcgttcatcacggggaaggaggcgaacaggccccgtccagagtgtgctggagcggagtccgtctgggtgcagcgcaatggccactgttttagagcagttgaggtggagacctgaagccgcaccaaagtccgtgatagtagcgagtgccacttccagctccgccgggctccgcaaatataacgccgtatcgtcggcgtaccctgcgaccctcaatgctagtggctgtgcgtgccttcagaatgatcccctgatgaacggcccccttctctaatcgcctgtacagtggttccagcgctagaatgaagagcagcggcgcgagtgggcatccttgccggatgccacgggtgaccgtcaccgttcgagagcgtgttccattggcaaggaagcgcacctttgtcccagtgtggagcttttcgatcacctgcacaaagtgacgtgggtagccgtgacggcgcagcactgcgcacaaaaattgttggtcaagcgagtcataggccttggcaaagtccaatagcagcgcgagagcatcccgtgcgtcatctgagcatagagccatccggtgtgcagcagcgaaataatctatcgtcgcgtgaatttgacgaccaggaacaaacccatgctgaaagatgctgattcgccgcgcaagagtagttcgaacctgagtcgtaagtagtcttgtcaggatcttgtagccagtatttagcagcgcgagcggtctgtagttgagaggatctccaccgtcgccactcttcttcaagcaaaagatatttgcctccaggaaggaatcgggaaacacttgttcagtataccagagcttgtacagccgcgtaagtattggaaccaatgcatcttcgtaagcccggtaccagtcgttgcccagcttatcaggtccacatgccttgtccaccttacattctcgcagcgccgttctaactgcggtttccgtgatcatctccgcatcagccagcattgcagtgtcatctccgatgtcctgctccatccagcgtgtgacgcgctcgaccgctgaagaagaggccggaacgccgcgcatgataggactccatgcgtcggcgagggtgtctgccttggcctgggggtcgataacagcgatgctggagtggtgacggagaaccgggatgatgttgtccccaaacttgcaggatatccgcttgaagaagtttttcgttgtcttgccttctcgccacgtatgcgatctaaacaatcgctgcaattttgcacgaatccactcgcgtttcgttgttgcgatgcgctgcgtgagcctcccgattttgtcgtggcagagtcgctggaggtcctggttggcttgttgagaagcggctcgagcgagctcctttgtacgatccagtcagcggtacatacgcttgatcttcttgcgataagccttcttcttgctcatcttcgctgcccttacagcattcagtagccccaccgcgacgcgttgcttcgttagatcccataactttgcagcttgctgcgccgtcgattccatcacgaaagttaccaccgcacgagcatctactatgcgtaacatgtaagcttgccgcaatacgattaaatctagcaaaatgactactactatagaagtccagctctattctggatatttcacgggtggatattgcgattcatgctcctgggcacaggtagcgataacagagaacacagacaacttgtttgtagctttacgccgtctgtcccgtgccagccccgtgccaggcatcggcgcggcggactcgcgtgtcggctggagtgccgaaatggctacatcctacgaggggtaccgattgtgaggtactcgagttgctgccggaaatgatggcgcgacgcgcgtgtgaggtgggactcttggaggtccgtggacgtctccatccccgctcgaggacgggtgtcgtgcgtacgaaacaacggaatatggtgtgaatgcggaggggttgtcgtgcccaaggacgaagggtacacctgcaactccgagaagcgcaaggagacgtattgactttaggatcgagggcggccgtgccgaccctcggcttgtagattcggtcgtaaatcttccctgtcttgtgaacaacaacaaccacaaagaaagcttttgtaacaactacaaggttatcttttgttgaagctttcactcgtctaaacacccagtcaccttcgacctcgtgtaggccccttctttccaaacagtcccagcgaactcgaccctgacggtggaggtatacgacacgtcctccgcctgcagctccgagcagcagctcccaaatctccaactgcgccagtcgggcgaatcgttgatcagcttctgctccttggcgttcttcgtcctgtccccgaagtccgcactctcgttgctggacttggacacgacgattggcggcaagttcaacatagtgtcgcttctctctgtgcgagccggcggatattccaacagtggattctgtacaagaatatattgcaggtctaccaccccactttggcgaatctgaaggtgaagtcgacgcctgcaaaccaagttgaccatcagcactcgccatttatcaataaatccatgaagaaacgcaccaaaatgtgctacacgaaaggacaaggtgatcagcatccagaccatcaacttgctcatgatggaccacctgtgcgtctccaggacgaatgcaagctggtaaagcacctgcatcccgcagttttgcctcactaccgccaccaacagtgcaaacgacacaacttgaagcagtccaaacacaaacacagggagcacggtatgacccgcgttcttcggcgtgacccccgccatctccgagtgatattggacacttggcaggtgtgacatcacggggatatacgccgcgtacaagagatggatgatagtttccaagaaggaggtgacaacgagacattcaatcgtaaagaacgtctccagtaaatagcgcaaaaacgacgggtgttcttctaccagattcgttgaagtttcaggtgctcgagctacacctgcacgaactacggtagggtggatcttcttgttgcctttcttggtagaaccaaagcaacatgtggcaaaattcacgggagtttggatgcccgcgacagtaggagatgatacaacttcggatgggtgacgtacttgcctggtcgcgtacagtcttcaacagaatatcattttgcgtcggtagtcggtgcgagaaattcgtgaaaatattgatgctgtgtcgaacgagtctcccgataatcgttgtatgtcagcacaacaagcacgttgcgctgagcagatcatccgggatttcaataccaggtgcagaatctcggagtccacataaaatattactcgtccggcggtgcaggccatacaacatgataatagtctgtgagagatccgtaataacgatggcggagattgcgagggtcgacatggcgctctgcatacactagccacgtagatggcgttgaagaagtccacagtgaagaccaccagctccggcgtcatatcttccacgtgcttcgtgcacctcagcacaatattttttatgacaaccttcatcaacggcaacagcaaaatcaccggaacctgaaactttgacctctctacaaagcggaatagtacttcgtagatcggatacacgagcatcatcatgatctgcgcgtgcaaaaagttcatgtactggatgagctgcttgcgttgtgcgaatagttggcgcaacattgggacccccagtatgactcgaaacagaacaatgtggaaaaggttgtagactggggacaacaccagcgtgaaaaataggatagatactgttggcagaaatgaccatcgaacaagccgtgaaagttacagcaattccagctgaaagcgatacaagttgacctgcagagatcttgaagctttcgatgaaataaaccgcttcacctgtagatgtctgggcaatcaggaaagtcacgacggcaacgcgtacccaaaatccagggtttacatcccagccgtcctgcgggtctcgcagtggcagcgattctatcagacaaaccagcacaaccgtcggaagtggcgtccaaacacacgcgagcatcgcacgaagcagggacgtcgtccgtgcatacgtctccaaggccagcagtcgatggatggagtattttccaccgtagtaactcacttgcagcttcttccaagcgctgagcaccttcgaccaccgacttgtatcactcatatcaagcgtcgggatgctgtctcgaactgcgtccacgaatacaaaaatcctctcgatcacggatgactatacttaacagaatgactccatgtcttggacttgcttgcagctgtacccacgagtgacgtggaaacataacgaggccatccacaactcctcaattaaggaacggaagagaagggtgctacttaattgcgagtacatttccctgaactccgagtaattccacagaagtcttatttttgaatcaggaaagatgctacatacggcatcgccaccctgaacgagaccgaagatatgcacactatgaatgtatctggggaagtaacgcatcgaacgagcaactagagaatttaagcgttatctagcagaaaacaaaagaaaattgccctaaagggcttgtagcacgttatttgctttcatgaatgccatcccaacaagcaacgtctttatagtgaagtcagttgttgcaagttgatgcaatgcgcgagtttaaatgaagtaaatgtactcggaagtccgagcgcattactcattactcgaaagtcctcaaaatgtactcgaaagtaaggacgacccggaagagaattgcccccgtggggttcgagttcaatcagctagttctgcaaaggtaaacgcttcaactgttcaaggggaccacgagtctatccaagatccagggcagcgacgatatgccccccccccctcgtgctggagttgcggtggagccttaacagcgtcccatgacgcatttccgaccattgccatttgtgcgccggttccagctttcaagctttgggtagcaactaccgcagcttattgtatggcagcccaactacgacgaacaaccaagcagaatacaacgggctgctcaccggcctggtatacgcacacagggcgaacattgacccgctatttgttgtcggggatagtcagctcatcattcggcagcagcggactcgcgcggaaccacgagcgcatcatttgcgtcaactttatatgcgatgcagagggctggcagacaagtgcaaggtagtcaagtggacacatcaactcagggtatttaacaagacagcggactcgctagcaaacttggctatggacaccgctcgcagcagacaagtgatattttctccagaaactacggatgatcacttccacacggtagtgatgcgatacgctgctatcgatctacgcaaatggctggatgattgattgtgcagaagatcgcagataaaacttttccgggttggtccaccgcataaacggactgaagacctgccagcgacggaaacgggcgtaggtaggaggtgtgattagaggtcgttaggtaactaagtgacaacaacacatctaataattaaaaaaaaactaccgcagcttaatgttgctacccactgctccgaccgtgctttggcaatctactgacaaattcacgaccaggggtgggatctagaaaaatgatgccactgttttttttcaaatgtatgcagtagcacctccacccgtagaagcgtttggcgcgcacgctgctgccacgctcaactactacagtagtaatagtagtttttttaaaggagatctcgcagcccatgaatacacgatgaagtctaaacaactaataaaggggtttatcccataaacctcctatcccagccttcccactatttgtgctgtatcgttttttttcaatgagactacaataatagcgggtgttaagtgagcaccgagtatattattggagcactgtcatcaacctcattcttgtcaatcatgtcgagggcgttgaccatgcggaccaagcttcctcgatcttggaagcggcttcaagtgagctattacggagggtcgtactccatccaccgtctactcgctttggagacttacacaaagaatacgtcgccattacgcgctctcctcgtgtgcattggagctccactacccatggcaatcatcgtttttattcaagaatcgattccgcttcgcggcctgaaagacggatggagcgccaattacggccagtggatacgcgtgacgatgctgactttcgtgataacttactcgtccacaagcccgataaattacttcctcgaggggattcattactctgtccgccaactggtacagctctccacctgcgtttcggtacttctcactgcgtgtacaatgctcatttctgcctatttgatcttcccgatcccgttctccgtgcttaccatgaccccgatctacaatattatttacctcatttcactccgaattgtggtgggggctgaggctatcgaacgtaccaaggcccagccggaacaattcaagcggttcttgaacaacttacatgctcaagtcgccatgatgttcgtgtacccaatctacgaggtgttgttccgcacagctgaaggctcgcactaccagcttctggtgatcctgcttttacccgtgatcagagtttttctcaagaatatcgtgcgaaaatccatgatgcatgcggaggatatggtaccggaggcggtgattttcacggtggatttcttcaatgccatctacactgcgacgtgcatgcaaacggcgtcctccgtcctctccatctcaatgatcaccgtcacggatttatctcaaaccgctgccatgttgtacggattacactactatctcatcaaaacttctcactagcgttcaagcatcctcagagagggagaagtaggacctactgctcagtgttttatctgctttgtgtcgagatcctgtaaaatttacgaagcagaatcgagcggggcttacaattcgttcgtgtttcgctcaccacctctctgaatcagacgcaaatctcctggatacgctggaaactactatgaacgaagatgatctatacagcaacaagcaaagaagtcaacagcagttgtaccatatccaactgctgatggtgttccatctcgtaaaccagctttgaaccactggctctgctccagaagtcgtaatggctccattcaaccaacttcagaccttgtaaacatggcaactcctccagtccagcaaggaaaacgactcactacgaataaaagctcccacactaatactatcgaccacccgacgttcctgcgagattcacttgaggtcctgttcactgtggagtgcctcgttgtcaccgcgtacctagaagccgtcattccgttgttctacaccgcgtacatattggtgatggtacacctgccgagctccagatatcacactgaaatggtcggcatgacgccggacaacgtggtagcgaggattctacctgtgttcacgttcggtctacttgagatcgcaccgctcgtgctgttggtggtcgtgatcaaacggaactgcaggatgcgggcgatttaccacctcgcgtttgtgctcgagtcgcagaggtcgctgatccagataaagttgatcgtgtgggtgatgatcaccttgtgcttccgtgtcatgcattttggtacgttgtacagtactcggatccgcaatacattgggctacagtagttatgttctgtcggtcaatgtgaactcattgttgtgtttttatggttgtgcaggagtagattttacgttcaagttcaaaggtttcgggtacaatttctcgagcgattaggctccaacctcggcatagaggcacataaatcagttgttctccctgtttgtatataatgaaactactaaagttgtggatttgatttttcatgaaagtttcttcattttacacaattatctacgatattttggagaaagatgactgtgtctgctgatgcttgcttgcctactacaccttggattagcaaagatgtaataaattgaaatatagcgctgtaattattaatgtttggagtgttcttgggctgcaacatggacttttgttggactttgccactcgtttccacttacttcgttgcaagatggtcaacacactacgagcgcatggagcgaggctgcttcatgcctggaagcgactacaagtgagctattacggcggcaagtattccgtccatcgactgctagccttggagacttacgcgcagcattcaagtgggctaaacgcactattggtatgtgtcgcgacgccactaccaatgatcgtccttgtcttcgtccaagagtcgatccctcttcgagatccaacagacggctggcgagtgaattacggattctggattcgagttgtaatcctcaccttcgtgataacgcacttctctacgggtcaagcggtttattttattgaaggatttacgatctctacacgacgattagtgctgctttctacgtgagtctcaatactgttcaccgctcgtacgatccccattgaagcgtacttgatcttccctctcccgttctccattttgaccatgaccccgatctacaacattctccacatcgtattatttcgggtcattatgggcggaaatgctgtgcagaaacttctgacgcgtcgagaacagctcgtcaagtacatgaactttctgtacgctcagatcctgatgatgtttgtgtatccagtctacgaactgttgtttcggcttgccgagggatcgaagtaccagttcttggtgattccgcttctacccgtgatcaaggtggggatcaaaaatattgttttgcggtgcgtcgctcacgttgaagacattgcgccagagtcggtgatcttcactgtcgattacttcaatgccatctacgtggcgacgtgtatgcagagcgcgttctcggtgctggctattgtggcgatttccgtcacggatctctcgcagacagtcataatgctgtacgggttgcaccatcggacgatttccattcgaaagatgcttcgacactacaccgactgtggtaatcctggtgatatgttgggcattatctgctcgttgtgtcaaaatcccgacaaattcaagaaggtgaagctcacagacgtccggatttactcgtgctttcctcatcaactatccgcggaggacgcggatctgctgaacatatgccaaaagctgaagtatattcacaccaagaaaactcgaattaattcagccattgtcgtgcctttactatgataagcatgggtctcctatattttgtaacactgtttaccccttcacggctgacttaaccttaccagaggaagtgcgacccacagaaagtgttcgtctcgaaaaggttgcggcagtggatcagtccaaaatgctgcacaatgctttggagctactgtttacctggaatgtctcgttgtcactgcctacctggaagccgttattccaccctttacattctgatcatggttcacctcccaagagcctgatatcacaccgaaatggctggtgtcgccctcgacaacgtgggtgccaccgtccttcctgtcttcgtgtttggactgttgcagatcgcatcgttctgggtactcgtgattatggtcaagcgcagttgcgggatgaacgcgctgtatcatttggcgttcgtattgaaagcgcaaagacctcttattcagggcaagttgatgatctggatggtggtgtttccgtgtcgttcatttcggtacatttccatactttgctgggttgatgtggagagcgaaagtaagcttactaactatttggtgtttgtactgacgctaggtgccgacttcacgttcaactttgcgaggcttgggtacaacttctaacggagtcagtttaaggtcgatcttgtgatgataacaagcgaaatttttgctcgttaatttaagaaacagaagtccgagatttttttgagtcaagcagagcttggtgtttgtattaacaccaatggatgccctgccattgttgctgcactttcatcctttcgttcaggcatatattttacactcgaattccgggtttcggcgacaaggaactgttatggattaatgatgtgtgcttactttgatgacgacaaagttcttgatgtcattttccttagaaactcgtgttgttattttcgcttgcattgttaagtacctaatatgattagaaataaaaaaactcgatgatcatggcagtaaaagagaacaaggagtactcgctgcactccatgttctcttttcctgtcatgatcactgatttgtttttatcctgccgcgatcttgtgcagtataagagatcggcttgcagtcagccagtaggtcgcttacatgatgtaagttacatccttcggatctcgattaaccctttcgtgaacgaagggtgcataatgctcccatcgaggtatttttgaaaacaaggtgcgattccaacccttcgaaaggggcataatgccttcttccacccgaaggggcgctcaacctcacccaattttattttgaccaatccagtgtaaggcgaataggagtaatgtatgctcggctgggctttcacctccaaaaacagatgaaaccctgctaaatgtgatgaaatttacgcgatagattcctgtctttggtagatgagcagcttgaaggcggctacacgaaaccgtcgtggtacttgcggttgatttaacgtggtggtgattcaccaccactggtgaatggaggctgagtgtcagtctcgaactcgccgcgtacgccaaagatggatttccgtcgcaaaggcgactatgtaaaggtttctcgtgcgtgttgaaagtttttgcgtgtggattggttgctaactgccctgtatagtttgctgctccgatcaaacgacacgcatcggatggcaggagcatttacggcgatccagcggaaaatctcaaaaaggtaggcatggcatagcatataatctccgtcaaacagcatccttattgcttccccttgtacaagcactttctttcttcagctgtgaaatggaagtagagtttgacgccctcaatccagtctactggccttcggaagaccgagtacgtttgtacattgtgacgtttggtaaactgtatgtttgctaagggtacggtcatgtcaaggaatacgagcgcgggttcgggtcctcggtggacgtagatgatttattgcggcgctaccagtgaaagaaatgtactctgtctatgctgctgcgtgggaaagcggcggtgagttcaccggtaagctcctacacgactttgtctttatcatgcgttggtggaagacttcgatggagatctctgaggtaagctttttgtcggaactttataatggcttcttaggtcgcttacttgcattcacttgattatgttatagatcacccgcaaggatatcaaagctcgcctatagtatctggatgcgtacctatcgcgaaaacgccgtgctttagacgttcatgtggagaaatacgttgcgctacaggccgacgctcttgctggtgacgacgcacgcaaccggcaccttgttgatggtttcaagcgtgagcgaagctacaatctgatggcttttctttcgagggccatggaagttgtggacgtattggccgagcagcttgaagacgagcgactccagcggaagatttgtaactgcgagaagttctgctactaccgttctcctgagtggttaacagccgttcggaatggcccccgacacactgccaccaaagcgctttcaccgtcaacgctgtgaaacgttctctctgacagaacactactacaaactctagcgtaaggcaagcgccagtttgtacgagttgtaagcctgtcaatttctttttctctttgtattacatgctaagttgtctttcactacagttgtggttaatgtcgcttggagctgttatcggacgtgtacagtggacaagtaaagccgggttacacattggtcgctggttataatgtagtgggatttacagattatctagctgccgttcctaccaacgcaatagtgcaatctcgtcggtcagtcggctcggtgctgccattggtcgttccgcgtggacaacgcgtccaggacgtgcgtggagtcgcccggcgtcttgtcaattcatctgaaggtggtctcggggttgactacgacgtccagaagcagcgtggtggtgtcggctacctcgttcaccatagtcgtcagcagcctgctgtaaaacaacctgcacaacagtcatcgccttcaaggtggcagcctctcccaccatgatggccgtgcgcacactgcccagaatgatgaccttcagcagcgttgaagggcagatgctgcgcactttcggtagccatgggatgcagtggccccagtcccgatgtctgccgagatgatacttggtatcgagaagcttggccacgcccacggtcaaacgcagacctgatacccaagtcgttggcgaagctcacgcagtacagcgccctactgcttagtggtgtggcagccggagaaacctccgtagcgtgctatccagccgtgtagaagtagcaatcgtactgtggcgggcaggattccgccggcgcaggtgcaccacgcccggcatggcggcatgaacttggggatgtcgtctcgtatgacgccaagctcggtgtccagctgtagcaaagcgttccgcggctgcgacgtagacatcgatcgtagggttcagcaaccgacgccaactacgatgtccagcagcaccgacgtcgagtacagcgtccaacagctcggatgtagacgccaagcatgacgcacaccagcaccgacgacatgcatggcgctctgcggctttgccgccacgaacgaggctcagtagtataccgagatccggcaacgacgacgtcgagcatgacgctcaccagcaccgacgacaagcatggcgtcagcggctccgacaccaagaacaaagctcagcgactccgacgtcgagcacggcgtccagtggcttcgaagaagccctcgggtgcattactcagcgggcaagggtgtgagcttcgcggggctgacttcgatcatgacggccagtatcgagaccatgtcgacgcgcacggtgcgcaacgggccttcgtgttgctggaggcgaacagggcgggacgttgctcggtggacgtgctccttgtggcgtctgcccagacgcgggactcgtcatgggcatgggggtcttcagcttggcagcatccgtgagcatggggttcgtgagtagggcgccgagtagcttggtggcaaaacgctggcgcagtttgcaggagccggcaaaatcggaagtgagcgattgatttgaagcggcgccgcgcgcgcaagatcgcggtttggcgcccaaagctttagttaattccaccaattgccgcccgctgctacattgaccagccaatcaccacacagcgttatcacgatcgctacctgtgattggcgggattagcaaaaccgaagacataggcgaaactctctgagcgattattggtagaaatagaggaagcaaaaagaccgcaaaagcttggatacgctgcagctaaccgcaaaatttgcgttttgcctgaatgggtgcgctgccgatcgatagcgacgcacgtacctaaaacaatacgtgtggtaggaagaggatctagaacaagcggaaatggtagttcatacagttagaaataagcaccacggtagtctgcaaaagctacttgacgtacacgcgcagcaatttcacccctgccgcctctgtcgttcacaccaccgtattgtcccggtgtcaccgccgccgcaccagctgtatttagcaccgccatttggccgtcgcagaaatctaatcaaacgaccagtagcggtatgatggcgccggcaaaactgcgcgttgctcaactccgtttgcgtaagggtatgcgcctttaatggcgccgcggtgtcctggcggcagccccaacccgcgcgtgctgttggcagcgtggacactttggccgcagtgatggtctgcacccagcactactcaagcctgcatccagcactactcaggttaccacctgcgtaatcttgttgctggcagcgtgctcgctgcccggcacattttgcgtggggatattgccgatgatggcgccgtggtgtcctggcacctgaaaagccaagctaatagtagtaaacgtcgatcgccatgaccatcacgtgaccctccccctgtactactcactggtgcgtcaccactaactgtacactgctgttgggcgaacaaacgataagtggtgtgggggggggttatcgagctatttggttccggacgagcccacccttttagtgtacatacaagtcaagaaaataaactgtgcgctgtggaaggaacatacgcatttttattactcacaaaagcgtcatgtattgaagcagcaatgtgtctggtttcagaaataataacatgaattattgctaaccctttctaagaagtcactgcagcgatgactcgaaacaaatcctcacatgaaggcagccagacagtgtgcgtccggtgcgccatcgctacattagtggccgtttgaatagctcttcgttgcggccaaaatctctgcattaacctcctccctttagcgcgccgtctttgatccgggacaatataggatgtagcggcgaatgcaccgctcgtcgtgtgttcacccaactgttcacccaacagcagtatacagttagtggtgacgcaccagtgagtagtacagggggagggtcacgtgatggtcatggcgatcgacgtttactactattagcttggcttttcaggtgccaggacaccacggcgccatcatcggcaatatccccacgcaaaatgtgccgggcagcgagcacgctgccagcaacaagattacgcaggtggtaacctgagtagtgctggatgcaggcttgagtagtgctgggtgcagaccatcactgcggccaaagtgtccacgctgccaacagcacgcgcgggttggggctgccgccaggacaccgcggcgccattaaaggcgcatacccttacgcaaacggagttgagcaacgcgcagttttgccggcgccatcataccgctactggtcgtttgattagatttctgcgacggccaaatggcggtgctaaatacagctggtgcggcggcggtgacaccgggacaatacggtggtgtgaacgacagaggcggcaggggtgaaattgctgcgcgtgtacgtcaagtagcttttgcagactaccgtggtgcttatttctaactgtatgaactaccatttccgcttgttctagatcctcttcctaccacacgtattgttttaggtacgtgcgtcgctatcgatcggcagcgcacccattcaggcaaaacgcaaattttgcggttagctgcagcgtatccaagcttttgcggtctttttgcttcctctatttctaccaataatcgctcagagagtttcgcctatgtcttcggttttgctaatcccgccaatcacaggtagcgatcgtgataacgctgtgtggtgattggctggtcaatgtagcagcgggcggcaattggtggaattaactaaagctttgggcgccaaaccgcgatcttgcgcgcgcggcgccgcttcaaatcaatcgctcacttccgattttgccggctcctgcaaactgcgccagcgttttgccaccaagctactcggcgccctactcacgaaccccatgctcacggatgctgccaagctgaagacccccatgcccatgacgagtcccgcgtctgggcagacgccacaaggagcacgtccaccgagcaacgtcccgccctgttcgcctccagcaacacgaaggcccgttgcgcaccgtgcgcgtcgacatggtctcgatactggccgtcatgatcgaagtcagccccgcgaagctcacacccttgcccgctgagtaatgcacccgagggcttcttcgaagccactggacgccgtgctcgacgtcggagtcgctgagctttgttcttggtgtcggagccgctgacgccatgcttgtcgtcggtgctggtgagcgtcatgctcgacgtcgtcgttgccggatctcggtatactactgagcctcgttcgtggcggcaaagccgcagagcgccatgcatgtcgtcggtgctggtgtgcgtcatgcttggcgtctacatccgagctgttggacgctgtactcgacgtcggtgctgctggacatcgtagttggcgtcggttgctgaaccctacgatcgatgtctacgtcgcagccgcggaacgctttgctacagctggacaccgagcttggcgtcatacgagacgacatccccaagttcatgccgccatgccgggcgtggtgcacctgcgccggcggaatcctgcccgccacagtacgattgctacttctacacggctggatagcacgctacggaggtttctccggctgccacaccactaagcagtagggcgctgtactgcgtgagcttcgccaacgacttgggtatcaggtctgcgtttgaccgtgggcgtggccaagcttctcgataccaagtatcatctcggcagacatcgggactggggccactgcatcccatggctaccgaaagtgcgcagcatctgcccttcaacgctgctgaaggtcatcattctgggcagtgtgcgcacggccatcatggtgggagaggctgccaccttgaaggcgatgactgttgtgcaggttgttttacagcaggctgctgacgactatggtgaacgaggtagccgacaccaccacgctgcttctggacgtcgtagtcaaccccgagaccaccttcagatgaattgacaagacgccgggcgactccacgcacgtcctggacgcgttgtccacgcggaacgaccaatggcagcaccgagccgactgaccgacgagattgcactattgcgttggtaggaacggcagctagataatctgtaaatcccactacattataaccagcgaccaatgtgcaactcaactttgcgcacgcatcagctctgtacacacggaataacaatttggcaaggtagcataggaagcatccttcgtatatttacatattaaagcattgccaacctactcacacggaagtatcgttcagatcgctcacgatcgatcgagcggcgcgaggtcggggttgctctgtcggagtgtttgagggtaccatggacgtctccttcaacttatacagcgatgatgatgtacggaggttgcctttctctgagaagagttggttaggaacgtagtagcgatgaaacttttcccaacatgtcaggtccgtctccgtgcacatatacggcttgatttcttgctggtaaatgctgcggcaaagccaaacattatgtctaccgcaatagtcggtcttttccgtcgcgtatcgatcctcccagcgacagacaacacacgcgcgccgctttctactgcaatcaccgagggcttgtcgtgatgtcacagcaacacaccgcttgtgggggcttccgtcaggaatggtagactgcggtactgctgtcgaaagaactagcaaagggattggctcgtcggaaccaacgacatcaaacgcaatacggccatcactcggcgaatcgacccatttgccagaaattagctccgatgaaagttgaatcatgaaatccctgtgcgaatcgcggtctttagacatatctaccacctgacggcgcgttagatacgcgtttgatctggcaatatcgatgaggccaagcgccagtttcttatgccacggcttgaacgagctgccgtcagcaatggagaaacgcgcccgagtctggtcgagtctgtcgacgccttgcatgtgcgcattatactctttcacacacatagatgccgggtaagtttgcttagtcgctcccacttggcgatccacagtccctatcaccgacgaatcagcgttcgaaatgacctgaacaatactcccatcgcaccacgacgcagccacgatactgtgctcggaagacacaccttgccgataatcgcctcgagttgcggagttcttgtctagtactgtgtgtttggggaagtgcttgcttgtacccctcaccgtacctcgtgcgtagagtcctttaagtcgcagcgcctgcaatagttggaccgaagtatagtagttatccatgttcacgattcgattggatccatagagaggccgaaccgcttcaagaacgagcttccggacagcagacaccttcgctgtcgctagttctccactaagttcttctgccgaacctgtgggcacaacgccctgcagcctgtcagccatagtactactgcaatgaaatcgaaaattcacagcaatccatgtcgtaccacaacacaacacgtaaagccggaagtgatacttccctgttggcttcatcgggttatagacaataacatggcgcccgaactttgagcggcatgcgatactgcactcatcgagggcaacctcccccccccagctcaatatattttcccccagtacacgtgagcaaattcaagaggggccgaatgtgcgcggcaggatcagtctgagcagatggaggcgcagcccggaagcaaaacacttttcgaagcagcttgaaacgcctcagtggcatgactttctccaaccccgacgaggtttggttgcccagtattatatcctctggttgcggcccccagtagttagagtattcacctctgtccgtgatcgtcatgaaaaatagaattccaatgaacttcatcagctccgccaatgtcacaggatgtgccaggttgatgcccttgatctttgcgtacgcattgcactcattgaccacttgctgccaaacgtacagtggtatgtacaccagaaaactcgatgacgcagaatgagtaaacaggtgcgtatattcaggccgcacacgagttacatttgctccatttttcctgtcgtacaagtcatggggggctttcatctcaacgcgggggtcgaaccgcatactttttacagtctcaacctctttcaatgttgtcgggagtggctgatcggggtcaaactccacgggtccctcctctacctcaacaaggtcttctagagaaacactcttgggaggtcttcatcgtcttctgcgtgcgcggttgtcaatgctgtccaggttggcttcgatgaagtttgcgtgagcaacctataattttcgattccttgttgtagaactccaagcggaacccagtgtgagtgcttctgaaatatggtgtctaaccaacgcacttcgtacagaacagcttagttttggacagtccgtcggcgcacacgacccacaataagctgaacccacaggactgaacgtcgactccaacttttttgtcaaaagccactttgattttgaaggtgtgtacgcgatgagattgccgatgtagtgctccgggcttgctggtggtgcaactgaatttctcgaacttatagcggcttgcgagcttgctatccgtgactcaacttcgttcatccccaaaccaaagtaagacttagaactgacgctgccatcaatatcaccatttgcctcatccgatgaagcatgactttgctctgcgatcctcgccaccgtgccttcccccacctcctggccgcgtccacgtccagatcgaccaccgcgaccgcgtccagcgctccgaccgcgaccacgaccacgacccgaacgagctgtaacacatctctccccgcgaccagtggcatccacgcccacagcaacgcctcgaataggctcctcaacccgtacttcaggggtccgttcgctaccacatccaccgaccgaatgagcaatcctcgctgctccagcagcgtttgcagtgtggccgtgcttctcgggcagtaatacccggctgcagccttgaccttgcccccgacgatcacgatctccaccaccgacatcgtcacaaccagtctgctcatgactgagtcccttttgctccactcgtccttcccgtccaatcgcaatacgatccatgtcctggtccagtaaagctccttcgccgcgagatgggtggtcgtcattagttgtgcctgcaccatttgcatcttcgtccacaactcgctcggccaaccccgcaaccatatcatcgtgatcgcctacgggcacactagaaagttcacgagtttgtacagaaacagtatcactcacagcagcaagattgagctgtaaagtgctggtgacgtgcgcgactattgcctcctcccctaaaaaagtctcggccttcttgcccagcaacaccaccatccggtgggatgtagcggtagcgggtgtccaaactgcgcaacgatggccgcttcgctgtccatccatcacgtaggagatctcgccaaattctcgtgaaagcagccgtctgtcatagcagagtacacgtaattaaaacccagcaaacatgttatcattagctgttttcttccgtacctctcgatatttcagcactgcttacatcttgagagcgcgtcaggcgtcggtacttcacagcaccagcagcgtccgtcggcacactttgctttgatcttgccatcgtttttttcgaagtgaagggggagaggccaagacctggggcaggggaatccatttattttcacagtacagatgtattgcgaacattagtaccggcgaaattgatcgaccataacccaaaaggttatacaaattgaagacctcgatgtcagtgatggggtggtgggatggggcggtatgcgcagggtgatgctcattgaaagatatggcgaagataaaagctcccacagtgtttggaagcctgctaagcacgctgcagtggcggcgcccgaccaatcgcaagaagtcggcgactcttcagcggcgcaggtttcacgagtctaccgttttggcctatcagaatgctctaattggtcctgtcgatgggggcattttgcatccttctatcattgaacccattgatggacacgaatggctacatgcccgatagtggcaaaatgcctccttctatttcgaacttacttgattttgtatagtatacaagaatgaagtattcgcgaaagggttaagcgatcagccaccacgtcaccgacgccatgacaattgccgctattgtgcggctcacaccttgaaggctcgacgcggcgctcttgctgctggccgaggtggtcgttgtggttgttgtcgtggtcgtcgtggtcgtgttcttttctgttcaggccgctggtgctgctgttgtggctgtgggcagctccaccttctgagtgcgctccgagtactttcggccgtactgatcgacgcacgggatgaagtactggaattgcaggtcgttcaggctccattgcatttcgcctgacaaactgatgtcgccgtcttgcaacttgtatgacgcggtgcatccgttctgctgctttccgacgaagcagcccatctcaggaaagtacgccttggagacgagcaagggcggtgtttgatcgtccatgaagtaggccacgttgcgtgcgcaggcaccagtgctgtacgcgacggcatcgtagtcgaacgctgttgcgtttatcgccagacacgtgcagccagaaggggccttgtattccagcgtgattgcggttgaatccgtcgaatccgtcgtcgtgctagaagccgtcgacgcatcatcgcatccagtcgttgttgtcgtggtggtcactatagtggtggtggtcatagtactcggtgctgggcacgtgtcctcgttaagacatcctgacccgcactccttgttgagcgctgggataatgttgccctcgatgatattcagcgcttcgtttgccttgtcaagcttgcctgctgccaatttggcaaacttcccagcgcctttcagagctgttgcggcatccaaagccgccgagacgcacgaatgaaccgtgtggagctgctgcctcgaaccccttgaagcagtctctgaagtcgtcgaacacggagttgatctcccctactcccaggtcgatgacgaagtccagttgatcaggtgtcaaggccttgagtgcattccccagggtggtgatgattgcatcgagcttgatgggacaaacggcatcgaaagcgcatttgccgacagtgattggattcagacaaatggcttgaccgtcgccgcacttgaacgtcccaaagaagcacttcgcctcagtaggtgttgactgcgttccgagcagcagcgcaacgatggcaaaacgtggagcaatgacgcgcatgggtttcttggtggtgcaggtactgaaggggcttggagccaccaagttggcagctcttcggttgtgatgagcaggtttacaaatgatcaggctctagactcgtcgtagagttgggagctacagtagttcgagctctaacgagcaatttcgatatttttactgtcaacagtagtcaagatgaaggaagtcgccgacagagcagatagacgctgtttaatatacaggttcaaagaagcgacttgtgtctccacaattcggtgtctatctctggtcgctgagcagcaactcgttcgacagagtcgcatgatcaccgcttctcatgtgtgctggtgggatgagttttcattcattgcgaccccgcaccttgtcctggcttgacagggcttactggtgcgaacattcaaatgttcaccagtacagtgcagcatcgcatttgcgatcgtgaggtcgctttcaccgacttcaacctgaggcatacaaacagcaagccttttttatccatacaaaatacaagtaaagtgcaagtccatcaatttggtgtaccacttacgtatcccttacgtctcgaccatctatcaaacgtggcgtcacccatttgatctcttcgggtggcacaagatggtggcgagaatgacccaagtgtgcgcggcgctggcgctggccacggcaatgctgacggcctcctctgcggcagagaagaagaaggaggcggcggacgacgagctggtgctggggctgttcacgcccaagtgcttcgaggccttcgcgacgcaccacgacttcgccaacgtcgagtgtatcaaggctgtggtcagcaaggcgctgagctacgccatcatcacgggcagcctgatcctcaagctgccgcagatcctcaagatcctgggcgccaaggacgtcacggggctcacgccgagcgccttctacatggaggtggtgctctacctgtccagcaccatctacaacctgctgcgcggctacccgctgagcacgtggggcgagaacctcgtgattctggcgcagaacgtgattctggtgctgctgctgtgggccttctacacacccaaaatcccggtctccacgcgcttcggactcgtggtggtgttcgctgccatggcgggcgggatgctgtccatcccggacgagtaccagtggctgctggcctctgccggcatccccgtgagcatcgtggctcgtacgcctcaggtagtgagcgatgggttgctgtagtgttgattattatgaggagaactgacggtgcgattgtggttggtgtggttttagatcctgtcgaacttcaagcagggccacacgggccagttggcgctcattacgctggtgctcaacctggccggctccattgcgcgcttgttcacgacgctgcaggagacgggcgacccggtgcaggtggcgggcttcggtgtgaccatcgtgctcaacggcacgctcgtgctgcaggtgctgctgttctggggagctaccaacaaggccctcgccgaggcgtccaagaagaaggctcagtaagagatcggtcgagtgagtgagagctgcgtgctacagtacagtagagctcatgccgcagctttggcggctgtcggggtgttattctgtaacaagccgtgttgttggccgtccttctcctcgtactcttcagtgtcctgcacactgtcgatgtcttcttcgttgtcttcctccccctccccatccgcttccagcttcagtctgttgagtttctgctgttgcgagctgatcctcttcttgggcttgggctggttgaaaatcggcgggaagtcgagcgtgttcataaaggtaatcgtcttgggcgctccaatcctgctgtaataccgcaccatactgcccgtgaacggcgccttgggcgccacgctctccgccttcttctcctcctccagctgctccagtctctgcagtgactgcgtattctccacttcggtcctcaccgcctctgccagtagctgcgcctgcgtcaacctgttccccgtcttctccaccggcggcttcttgttcttcgccgccaacttcgccgcttcatgcgacgctcgtcgtctcatctcggacgactcggacgactttctagccgtcgaggaccgcaccgtcggcgccacatactcaaacacaggcgtcgtcggcgcagcagctgctactggggccttgttcactgctgcaactgccttccgtttagctggtcgaggctggatcggctccttgtagcggccagagctcgtcgccgagcgcttgcgcctcgtgggcttctcatcttcttcagcgtcgtgcacctcgtcatctggagcttcttcgtcgtcgaaatctgagtccacaatgtcctcctcctctgagattgataaaacccatagagttagcgataaaacccactggattcgcattgcaacgtgttgatacctgcttcggtggagtagtcttcgtcttctccgtcttcctgccacgccgcttggccccagaacgacgcgtcggcctccgcctcttcgccgatgagtttgttgatgcgcgtgccgcgagaactgcgagctgggagcaccttgcgggtctccgtgtcggctgcagagctgggactccggcgacgagagtggcgcgatgacatcgtggacgcgataatgaaaaatgtgtggcgatacataaattatcgtgggttttataacaatgtattgtgtacccatttgggtgaaatgagaaaaaaaaaaagttgggtgaaatgatgtatgcgtacttgttgctatgattgctgcgatgcactcttgctgcgcaagctgagtcaggattgagcttctcggctttcggcgttgaagccacaactgtcggatctctatatggtgattttctacattgttacccaccacttttaaaccctagcgcggggaatgaccccgtcgctctctagaactgataatgcacgatatcccagtcaactcgaacagtgaactcttgacggaacatgcgccatgcgccgacatgtccatgagctccttgcgtatgagcccacccgtcaatggtattgcgcgcgtcgggcgtgacgcaacgctggcgaactattgaaaactatctctataccaggtttttcgcgtcgtaaaagtatctttccattaacacaacacgtggcaacatggcttgctcggcgccgttggcgtaccgtagacgccgaagccggagtcgtccggcaagcaacgtgacgactcggatgaaaatgagggggaacgcgtggcctcggtcctttcgagcatactacagcggcgtggtgcatccccaaaagttccgccttgtcgctctgacagcggaagttgaagtgaatcccccaacgcgtcgaccagagagagagcggttttcccaaaagtatcagctcggccaacacctctctcacgaactgcattgccgttttcgctgcttgatagacccacatcacttctgaaccgaacaagtcggcgccgattgctggcacaatgcatgggcggcgtacatgtattttcttgacattgatgcgccgcaccgcaaaaagcacattcccgtctgcctgctggcgctgcagtcgtcgagtgtcgccgccgaggcgaggcgccaagtgaagtggacatcccagtgacgtcttctcccctccacgacctcgcccaccctcctccgaactgaaaaaagcgcgcggcacagcccacagatcgacccttgcagaggcgcggccggccaaagctccggccacttctcgccgcaatcatcacggcaacgcaacgggactcgccaagcagctttcaaaaggcaacaagtcagcacggctagccagtcgcgcatcaacaatctatagcgtgtgtccgtcttgtttctccccataaatgagcccccaagctcgatttttatgctctaagtaccactttcaactgaccgcaggaagcccctatacacaaatacctctacaactacataggagacggcttacatcacacatctaatatcgcgtttacggttacctagcccactgttcgttctccacacatcaagtttcatcaccctgcaattatcaggatagacgaacgtagctgctcgaggatcccgtgcccgtcaacttcatgcagacgatcggcgggatggtgtcgccgctcatggctgtccaagacccgccgccacgccaccgcgccgacctcgcagcagaaagcgcgtggcgattcaccccaccaaaaagagccttctcccccctcagtctccaaacgtccacttcgccgctgctttctctctcttctgcggtgcagtgcagtcccctcgaactgatttcgttccacttgaccagctgcacagcgagtcgaacggcccgcagcgagtggcgtcgagcgtggcggtggcgttgggtgcagcagcgttagtgcctcgctcaaagttggaagaaaaaggcagcgccgtcacctgccaaagctctcggactaagaggctgcgaggcagggaatcaattgggattttccaggctccgagctcaattgggggatcggaatcgcaatagtccgtcatggatcgagcccgcaggactcgcaggagacaggaggcgccacgggctccgtcgaccatgaaggcgggcgctgcagcggcggtgctgctgctgattcagggggtggcgggacaatcgtgcggattgacggcgtcgacgctgtccacgagctgcagcgacgcgtgcgcgcagtatgagccgtgcgtggcctacagctcctgccccgcaggcgcgacgtgcgtggcaacagaccagtgcgcgatccagtgcttctcgaagccgttggacgataccaacgcgttcacgttcttggtggagttcggctcgtacgagagcagcagggagaaagcaggcagcgccggatcttcgctggatggagggcaggacgagacggagacgtacgcggcggcgagcaacgacgccgtctccaatattagcactatcgagctgcagccgacggtgacgtcattgtgagtcatttggattgatacagatggagtttcggggtctagagctgtggctaaccactgtaatttgttggctgcagcgtgttagcaggcggttcaaacagcaattcctccgtcaagggcaaggtggccaaggtgaccttcggctccgacgtcatctccgcgcaatccaacgtctcgagcgtcgcgctgcgcagtctagacttgtccgcggacgctacgctgcagcagctcccggttattctcccgacggcgctgcagaaattgagtctcgccaatacgctcctatcggcgtttccgagtcttgtagcgaactttaccagtctccagaccctgtaagtttccattttagagctcaggttagctcattattacccatcgtgaactaacaatcttttttttgtcgatcagggatctggccaataactatatcacggagatcgccgcaacagcagcgcttaactcacttgcgcacctgtacgtggcgagtattgcgcaggatttgtctgataattgggaaccacggcttacatttggctgtttattcacttttcaggtgtttcctgaacaatgagctcagtgcttttcgggcggtttttccgaacctcgagacgctggacctgagtaacaacaacctcacggatattccagcgaccatctacatccacgacagcctggcagagctgcggatgaagggcaacccgctcgagtctccgtggttcacaaagtccgaagcagattttctagcgcagctctcgactctggatctggagaattccgactttaccaagcccattgacagctgcagtgcagccaaccgacttgcggtgcattccttgactgtttgcatttcggatgccgggaacgacgacgacacggacagcagcgacgaggtcaccacaggctcttcgtcttcgagctcggacgtgttcgttattgtcggcgctatcgtgggcggtctgctggttcttggcggcgtggtgtttgctggcgtttggctgtaccggaggcgagtgagaaggccacagacccgacgctccaagattgttcgcgagtcgtactttggtggtgtgtcaccccctctagctcgatcccctgttgacaaggggtatcgcggtggccgccgcactcctgtgagcggaggaccgcgattctgctcgaacgactacgaagaggaagatagctactcctcgccaagaatatcgacacgcagtacgcacagtaacaacagttcgatggcctattccttgtggaacgatgaggagttgctgtcacttcaggtcaagtacgaggagatcgaggatatcggaactattggcagtggagcgtttggaattatttggcttgtgaagtaccgaggaaatcaactcctcgcttcgaagcggcttcggtccgatcaggttactaaacagcgaacgcaggcgttcatcgaggagatcaagatggtggcacctttcgatcacccgaacattgtgcgtctcgttgggtgtgcgtggaccattgagacggatcttcaggctctcttcgagtacatggagaacggagacctacgtgactatctggtggacccgaactcccctcgccactggagccaggagttgttgcaactggctgtggacatcatcgaggcgcttgtgtacgtgcactcgttcacgccgccgttggtgcaccgcgacctcaagtcgcgcaacgtgctgctttcgggcgagatgcaggccaaggtgacggactttggagcttcacgatacaagtcgatggatgagaccatgactgcagcggtgggtactgggcgttggctggcgcccgaggtgatctcgggcagcagcaactacgaccagtctgtggacgtgttctcgttcggagtcgtcttgtccgagatggacacgcacacgattccctacgacgacgtgcgtggtgccaatggcaacaggttgaatgacatcgccattctccagctcgtggctacaggtcagctccgtccgagatttggcgcaagttgtccgccagagcttcgtatgctggccgagcgctgcctcgcgcaggaccctgaagagcgtccaccagctcatgtcgtggcgtacgagttgcgagtcatccagcgctctcactacacgctgctgtaggggggatagatatcatggtgttagtttagttttgggcatgggaatgacacgatgaagtgtgcatccaagacaaacattaatcttaagtataagtatgaaaacgttcattggtgctcgtaggctagcaatgaagctctcctgcagtgaacttacattgaattcttggctttgacgaccagtaagtgaagttaatagatcgctcccgatttctgcagcgtccgcagtgcgaatgccacttcaacggccgtgggacgggcttgagggtcgtaggccatgcagcgtctcgccagctcttgaagctctggaggacactgcggcccgaacgtcggcagcaacctgccggacgccaccagctgaagaattgcgacgtcggcgagagggttcccaccagctccacgggcgtcttcgtacgggagcatgtgcgtatccagctcggacagcacgacacccagcgcgaagatatcgctggtctggtcgtagtctctgttgcccgcgattacctcgggagctagccagcgaccagtgcccacgccacttgtcatcgtgttgttcgccgagcgtacacgagcaacgccaaagtcactcaagtgtccccgcatgtcttcagacagcaggacgttgcgtgacttgaggtcgcggtgaacgatcggaggcgtgaacgagtgcacgtagaccaacgcctctgtgatgtccgcagcaagctgcaatttctcggtgttccagttcctgggggacgacttggtcttctcaaggtacgttcgcaggtcgccgttcgacatgtactcgaacatggcttgtagatcgctctcaatggtccaggcgacaccgagcagctgcactacacgagggtggtccaatgtagcgcacagtttgatctcagcgatgaagctctgtgtgttttcgtacgtggcctcgcccttcttcaatcgcttgcaagccacgagtttattcttgcggtatttggcaagataaacaaccccaaaggctccagttccaagcttgcgcacgtcttcaatgtcgtcgggattcacttgcagcgacagcaactcctggtcgttccagagcgacaatccgcctccagccgatctgtccgaatagcctgtagcggtcccgaatccctttcctcgggccttacgtctgcggtagcagaagaacgcaatacctgccagtaccacaaccacgagagcaccgacgataccacccacgatagctccgacgttgctactgctgcctccacccgaactggaagaactcccagcacttcctgtgctggtgcacactgccacaccactgatcttcacttgcgccgactccgagcacgaggacacgtcaccgaacgtgtcgatggtgaaagtcttcaggttctgcaggaacgtgacttggtctgttgtcagtgagaccccagtgaacgagttgtcactgaggttgagatacttcaacttgggcatgtcgaagatgttcgacgggatctcagtcaacgtgttccccgacaaatcgctgcaaaaaatccagttagatcaaagaaaataagtcactcatacagcaactggaagctaagcaagcacacagaacaattcgtacaggttcgtcatgttggggaagttgccactgcaggccgtcaacgcattcgtagacaagttcagcgtctccatcgtatcatgggaaaacttgaccgggtagtccttgaagtagttctgcgagaaatccctgtttccatccccatacgcgtcagcccacacatctcaaaacaaaaacaataaaaaccttctactcacacgtgcacgacggacgtcatgaactccagatccgccgggtacgtgctcaacaagcagttggacatcgtgaagctctcgacattcgtcgtcgggaacgtcgactgcggtgggtccacgtcaaacccaaggttcaccatcgtactacaacaaaactcaaatcagttctcccaccctaaagccccatccaccacattcacgtacatgttcttcaactgcgtgttactggacaagaactcggcgctgagcttcacttgggatacttttcccctcacgccccacacactcgttccccctacaaacatccttcaacataagtagtaaaaaacaataaaaaataagaaccacatataataaataaataaatccccaccaccacaacgtacgccgtcgtcgtatccgtgaggaacgtcagcggttccatctcttcaaacaccaggttggattcgctcgggtaaagctcggtctcgtccacttcacttgccagttgcgagtcgaccgtgctggcctgggagctggtccagttggcctcccacttgctctgctcgctgccgtacgggatgaagaagacgtagtcgctgaactgcacggccccgttggctgcaaagtcgctgggcccgttggtgaagcactcgaaggcgcacgagtcgccgctggagccactggagctgctggagctgctggcgttgccgctgtccgtgacgcacgtgccgaaggtcgtggcgttgcaggccgcgtccgcggcgaaggcgatgcaggggcgcccctcgtagcactgcgagctgcagtccgacgtcagcgccgtcgtgtcgcggctgcaggccgcgtccgccgccttcaccagcagcgacaataacagcactagtacgcgcatatggagggaggaggatctagtggtgctggcccaaatcggcgtgtggagtgtggtgcactacgagctttttttctgtctggcgaggggccagttgaacccagtgaagtgtggaagtgaagtcgaccgataggttgataaaagggatgagttgcatggcagagggctgggcaggtttcgactcagatggtgtggggaccgccatgtggaactgcaggaaggggcctggaggctgcatgtacatgtactcggcgcgaacgctttggagggtccatttgctgcttgatggttggtggtgtaggcttcccagggatgcagccatacttcatgatgaagtgactggtacgggcgttggcgttggcagccaacttggctcgagttgatactcggtatcaactcgacgatccagcggaggacaatacgctgaacatgtacacgcagacacgggcaattacttacttaagtattgcccgatgtgccgtcgcctcaaacttcctgctcacgatgaagcctgaacctcctcttttcaggacattcagctttggaaaattcaatcgcggtggtgtcaaccgacacgttcatatattgcgccttccaacctacgcacagcaccagctacgccgcatttcaagcaagtggccgccgcgctaattagggcccttagcgcggcggccacttgcttgaaatgctcaaagtacggagcgtaagctctcgcccccgacgccgagtccatgcccaacattttcctcacgtagctggccgacttgcctgtttccgcccagatctcgactcgcgccgtcaattccgccggcgtggccttctcgctcacgaacttgggcatcagatacccagagcctatcgtcgactcgacgttctcgtcgaacgccttgacgtagttcttgtagatccggaatccttcagtgttcttgatatctttgagcctctcaacgctgactcgctcgaagcccatacccgaccagccaatccttctcaatcgtcgccttatacttcaaaaacaacttgtagttcttgtgggacgttagctcagctccggacagcccctccagacccatcttcttcttgacgtagcttgcaggctttttgaagtcgcgccaccacgccattttcagcttcatagggatcttgtcggagattttcgacacaatcgaagacacgccacctgctctctcttccgtctcatttggttcactcttagcatcttcatcgacggcgcggtcgtcttggtcgggcgtttgagcgacacgtagtactcgattctgtttggcgttgctgtaacctgtagtagtggacagatccgtgagtggagattccttcaacgtcagggcctctctggctccagtggacaccgagagcacctcggtgaccaggagaatagtagccatcaccaccatcccagcacaacggcagcgcatggtgaacagcgaaagtaaattccaaactgaccatatacaccaagaaaacgatggggccgagtgctgaagactttggtaatacatataatgatttcgctcgattactatcctgattattatatggcgctccccagcgaatgtgaataaaccgaattcccagtcatttcggtctaccggtctgggaagcgttcgtttagtggaagacatcgagctttctaccggctgcatatgcgtacagtattagcacagtcgtcaattacttacctacatgtgcatctgatctgtctgatgagtaattatactacatgtagttctagtgtgcacgattattgcttccataaattcgaaatgactcaatagtaactaatttagtagcaaatgtactactagttgtactaagtactacttcgagtacttctagtaacgtagtaatatgtttatcgagatgatacttcacttccattcatggtctttactggtggtgaaggccactgaccgtgttcgacttgcacaccccagtcgagctcgattcaaaaaggactggttttggacaaattgttggcttggattcgaatggcgttacagcaaccatatgacgacaacacgacagaaattaaagcaaccacaaggcctaaagcaaccctaaaactaactggcacccggtaatttattttaaatgacgcgtaaatgacagggacacgtcgccctcgtcatggtcttgctacatatatatctaaatttagacacgtcgtggtggcgtctaactgatgttctctacacagcaatacgtgaaacacatgacaatatgtgtcccacattttcaacacttagcagattttgagcgacagcaaaaatggagaagaaatcgctggcacatgagctggtgcgcgcgagaatcgccgagattgcactcctcaagaagaagctggatgagcttaccgagcatctggaaaagcttctggcagcgcagctacagatccaagccctcgtcgaagatcgcgaagagaacagctatgcgttagcagccgtcttgggcgatgaaggggccgaccaaggtggtctcaccgcagaggacgacgctgtttccctcgatgttctactggagctggcagtgcgaaaaatgaaagacttatgcagcatagactctgtatttaaaggtaaatacagactgtggtgtttatcagagctggttctgtagctgctgatgaatctggctagctttagcgacgtcgcgttcagagagatgacgttcttgggagtaacacatgatgacccacagcattttcaatcgcatcaccttgacgtcgttcttggaaattctagaaagttgcatctgcaagttccccataagatagctgtgggcttgggctactaccattacaccacagctagcaaaatcaggttgttgaggggcacagatccactcaatcggatcgaagaaaagatggccgcgggggtcagaagccttgtgccaccgctccacataaccacgaagcccctcctttccttcattttctttgtctttcggaattccagtccacacgatttccatttcatggtgatagtcatcatcaatgagcggctcgtacatgtaaacatacacccgaagcttgcttgtttttgccgtgtagcgtaggcgaaggataattacctcccgtggtctgcgtgcagattaacggggtggataataaaatatgttgctgcaagtgctgtcttagggagatttggccatccgatagcccatgtcagtgatgacagcacatggcacttccccaccgatctagcaagggtctccaagcaaaagtccacagggctatcatttagccatccacgacagatccctcccacgatgttgtcaaagctgatcaggactttgttggagagcgtcacaaattcagtgcgtagccgacttgaagtaaactttgagataatttcgttcgctagaccttggtgccgctcgggaacagcatcacgcggtagtcctgcagttgctgtctccgcagcgaaaagatccacgatggagtcaactttacgccaatcttgctccagccactttcggtccttcaaccatgaggtacatttcgccttgatcgcgtagaatcctgttagagcacctacatattgtctagaaacataagcatgttaaagcaaccctattaaagcaaccatatcgctaaagcaaccatacccgctaaatttccacagttttggatcaatcgccaagacgacgtcgagaacaagtccttgcttcttggccttttcatccagtacaattggctgcttctccttccgggtagtagtcgttgctgcctgcattgatagggcgaggtcttgtggaattacaaatgtgtgcatgtagtccgcaggtcgtacaatttcccaatgacaatcaaccttccgagctcttagataggcatcctccagctgaacaggatacttcgacagcatctccatcacgcgcttcagatttgaggtgtttctggcccaaatcaggaactgatccaaagtcacggcaagttcagtggggtacttgtgaacagcaagacggtcggctttgagactgatcgtagtttgcctcagctgtttcggagttgaccttgactttccttggcttggtggcttaggaactctaacgacatcgacctggcgcacgtgcgactctgtgtcaggcttcgtagagcttgaaaccttgtcacagctactcattccgcagctgtcatgagatttctcgtcgatggggggtcgaattggagatgactgcgaaaggtgagtgcgttgtgtcggtaacatactttcgtcggactcgtaatcgctacaattcatggtcatggggccgctttccaatgcgtccatgagcgtcatagtccccattgcctccacggggtccagaatggagtctgagacaggttcagatacatcttcttcttgcttgctatcttcagcagattctgtagaactcggttggggggcagggttgacacggttgagccctatgtcgatcgtttccttccaggcacttagctcttggtagaagtctccactagacaaatatgacaggtgttccaatagcggttccagcatcgcttttgtgtatgcgtatttttcagctgaagacaatacaacctggtttgcccgttcacctcgccgtagccgtacgtacgcaacttgcttcctagctttggttggcgaagcgttacccccccgcagcataaagtggttgttctggttcagcccccgtgtcgttcggcaactttactttcggcaaccttaacttggacatctgcacaactggctgtaatatttccgctgcagccgtcaattcgtttctcacttccaaggtctggtacgtactccaccgatcatgaattgccatagctggaagcagtttgaagccatgcccctcgcgtgctaagtgcataagatgacgacatggtaaatggtgactgctataaaatagacaagtacacgtccactccacatcgtgacagcgaaaggtttgattcccgcaatatatttttcattgtgaaggactcgacgctgtacgctcacaagtcgcatctgccatgaagttcacaaatcgttcccactattttctcactttctcgaagatgtcagggtacagtcgagttgctaccgtccggagaaacatcggtatggttttaggaacggtcgaagtcgaatggtgctgcgcggtgacgaacccgatctgctgagttatcatgatttgatgctgcaccaagcccgcaatagtcttgtcaattcgtgtcttgtgccccaacagtattttcacttgattccagtttgactcgatcctgttcgttgtagtattcccagccgtgaaaaatttgctgcgagcaaagttcgcccacatgtctcgacacgaatcccagttctttttaaagtacgagaataaagcttgtttcttgttgtcttcgcagtattgcttcaatgcaccgaaactagaatcgtaacctgtctctgtggagctgcatatggtttgttttccaaagttagcgttaccacaagaatcataaatagaacctgttgcgtacctgtacagcgtttttatcatcgggttgagtaactcgtcgcgttcagacaccttcagcttgtatggggcccgctgcatcaccttcttccagtacgaaatggcatggaattgacaaagtaaaactttcgcagcaggaaatagtgttttcagcaccctccactcaacgaaatctttgtcgatcacgatggaggatatcatccgccaacttgggttcttctcttgaaaatactccaggattgttgtcatcattggagctcgttggttgaggcatatgaagtctacaactgggaaccctctagcagtagcagttgtgacgaccagactccctgaaatatccaacacacaacagtagaaaattactttgttaataaggttgctatatcatcgatatggttgctataactacgcaaggttgccgtaacaaatataaagttgctataccgaacaactcatacgcacccaagtgatagcccaaattgttcgtgccgtgagtgaaatccatcgtaagagtgtcgccccagcgctcgaacatcaacttctgcacctttgtttgtatcacgataccgcatgtcacgtccatttggtcttgaataacaaggacgtcactgccgtctaactggcggatagcttgcagcatgtctttcaaacgggcctccgctgcgtcgtgccccataatactgcggatcagattacgggtctgttgaggtgttattttgcagcctagcaaacacacaaagcgcgaacagtaacgtaagtatcacttcagcatatcatatataaaactatgcaccggttctctcattcaggaagttcgtgatgtgcttggaagaaacactagcatccgttaaagtcttaacatcttcgagatcttgctcgtccaacggaagtgtctttgttgtcaggtacaacgatgattgcgttcgggtggtcgggtgcgtgtgggtaaagttctgattatcaacagcgacatgtgagaaatactaacaaagcaaacacacgaaaggcagatacctcgtttcttatgacaattcgaaatttgccattttccatccgctgaacggttggtgtcatgcgtgcaggacacccgcaatagttgcgtgcaggacacccgcaatagttgccttttctattgcgatgtcccttggagcgcgacgcatgcgaaacaccgtgtgtacagcggaggaccttgtgactccaattaaaacgtgaagggatttggtcccgatgcttgctgcatatgaaaggggtttcgttaataacttaaatttctcatcaaacagaggtcacacatacctgttgtactgatttcgtgtctccgagcttcgtactcgaaacttgaggtggtgcttctgcttgtatattttcaagtgtgcgttgaacttgctccaactattgataattgctggggtaaagggcggaacggggttgataatttcttcgcgctcctcgttgatctcccgcaactcgtcaaggtgcttgcttgatcgcttctgcggtatgtactgcttgttccgcttggataaacgtggggccgaatcagcgtcgacagactcgtgaagctgcagctccgccttacgctttttcgcgaaagattgggcttcatccccagcagaaagcttgcatttagccagagcggtacctatcgatttcaaagtgaatgtcaatattaatgatagcgcaaactttttgcttaaaacgactttaacgagaatacctggtgttttcttgcgtgctgtggctttctttctcggctcggggctctgtttgcgtgtcctgcgttctaaacaaactaaaaaaatacacaatacattatcagttcaactcaataagtatcaacaagaatccaaacgagtcttacccgcttctgcttcgtcttctgtgctggattctccgtcgtcgtctggctcctgttcatcgtcactcgcctcctcttcatcgtcgtcaccctcctcttcatcgtcgtcaccctcctcttcatcatcgtcaccctcctcttcatcgctatcgctctcctcgtcatcatcgacctcttcttcgtcttcctcctcttggtagcaatcctccgcctcttcgtcgccgttgtcttcctcatcctcctcatccagaacaaagtcttcgtcttcgtcgtcgtctttttcaatcccgagagcggcgtacatgtagtttagctcctcgtttacgttccgcagctttcggcctaaacaatacataccgacagaattcaaacaaaatgtgaggcacgtagatactctcgttgccaccaacatggagcatactgattaccgtttataatggctccccccgctggagccatcggccccccctcgccgtttggtgcttgactgattcgcgagaggtgcgtgccccacgtggcctccgttcagcagcgcgattcttaaaatgagcggctgtgaggtggcgtacttaatggcatcgtagctaatcagaagcgcactttagcgtgatttgcgtacctaagggcttaatggcaatttagacatttaaattacgctcggaatttttgaaatccctaaaagcaaccatacatgtctcagaatggctaaaagcaaccatacttatggttgctctaaccactccccttggattccaagttgggaggcacgtagaaaaggcagggttatccagcccgattcataattttgcctattttaggccgtgttcgacttgcacacaccattcgagctcgattcaaaaaggactggtttcggacaaattgttggtttggaaggcacgtagaaaaggcaggcttatccagcccgattcataattttgcctagacctgaatttcaaatccagctcttttgagcttatcgagctggatcgcttcttgggtgtttcaggtcgcaaacgagctggatgaagcaaatccggctgcatttggcctaaaacaactggattggatgcaagtcgaacacggcctaaagattagcacccaaattacagcatgcatccgtgttgatttgcctaaagcagggcttttatatttttgtagctcacggttatgttgggcctttcttcatacttcgcagatatcctaacaggccataactgctccaacagagctgtaattgaaataaagttctacaccctaataattaataattgatttttgttttacaggtgtgaggtttgaacccgctgcgtcatcaataataatcacatttagtaaaatactctcaaaaaagtaaaaagagatattcgacagactgtcatgtttaagattttttgtacctcaccaatcgctgatgctgatgcattatccaatgagagatatcacattagagcagtgtattttagccactcgaaattggagttttcttttcttttcaaaataactgctaattattttttgtgccggagagcttactgcggccacgcgatgtatcatctcgcataacaggttatgagtatatctctaaaagcttagtaactattatggttaaacgtggtttgttattctggctcaaattattttatgacttcaacattttttaaaaactgtccacgtacttcaccaaataacggatagcgccaaatagcgtacacttcccgaattgaatacctcctctcaaatctgatagaatgtgctcagtacacaaagctactgtacctacgccaatttgtatacctcaaccaaaccgtatagaatgttgagtacacatgattttcttgaaatgtatgtgaaatttagcatgttttattggctaagagatgtcttgaaattgaaaatcacccattattttccgtgtaagtattactttgtcaactacggcaagcaagatccggttatttttatctttttaaagatcacagtttaaaaactgacacttgtcttcggtactgtttgccatttttgcaactttatgcaaaattaccgtaaggtacccaaagaaaaatggttttggttgttggtccaagttctgcttgcatctaacggcatgagaggcgttgtgaacaaactctgcgcaatctatggatgtctccatggtttgaagactagtacatacgttggcaggatgccatcaaagaagttttgcagaacgtagctagctctacacacaatatccagacttgaatgtgtcggccctactttggtagtataccccccctcctatttgtatatctttctaaatttgacaagtgttcaattcaacagtatgcggtatacaaattcgcgttttccgttaaacgcgtttttatatgttgcaaccgcactaatttgaacgtaaaaacgtcaatttccccaatacgaagattttatgataagatttcgctttacactgcgtgctggatgtcagctacctacattttgtttatatcatccgtcaagggcttcagagtgcggtcatttagctaaacgtatatattgacgaagtgcgatattaacaatagctttctactcctaaaaatccagattactctattttaaaagcattttgaattttattcttgatctaattggctaatactgagttatttaattaggcgaaaacatttttagcaaatcaaactgaaaggactctctaaattgcttaaaacataccatagaatattacgaaatacatgtattttgtgattgatcgccaggtttcaagctatacatatatttggtttaaatattagtaaattattgaactcagacagttatagcaagcttgggctctcaaattatatagcactgaaggcagtgtagagagtgacatcgacagtgatagtgatgacaacggggatgaatttaacgacatgaagccaagttatggacaccgcggatgcatcagcgactggggttcgcgaaactttctcggcgatggttgctagagctgtaatggttctcgctgtggtggtcaacacgctcatggtggagcacgtgggccgtggtttcgcaagcaccagctcgactaattggttttcgtgctatgtatttgctgtgacgccctgaccacacgcgatcgcgacggcaacttggtgttttccaagattgacatttggtaatgaccctaccgtctgggacggtttttatctttgcaagcttggatttacaacgcgcacattccagatacggcttcaagaggtgtatcaagagctgcgcgatgctggcttcccaatggacgagatgaatatgtagctcaagtatatcctgattggtatgccacgccagaggctcaagcttatcgaagataccgcgtgcaatacagctacggacaggcaccttcggttccggcaccacgcgaacgcagccgttggcgctgcgggggcgagctaccggaccacacgctcggagatgaacgagctggtgcaaggcgacaacaccagcacgctgtcgaagctatttcgggattcggccacgacgctgctggagagctgggacgcggcgcctttcagcaaagatgagcgtgcggagtccgtggacctgttttggcacagaatggaggctgagcgtctgcggcgtcaggaggagatggcagcgcagagcggatagccaggcccagcgtgcacctccgacagctcaaggcttgacggttcaagacgctgacggtgcttcaagtacaagcggtgaaggctcaagtgctaccgatgaaggccaagacgcaccagaatgcacggcagccgctcgctgcactaacccttgtgtcgttctcgatagtggccgcgtgctcaagacctgccagcttcatcgagacctcgacagtgcccgacgggagagttacgactcgactcgacaccccgcgctctgccgacgatgccgcaatccgcgcgcacaagtccatggacggctgatcactctttgtgaatatcatcgcgaggaggaacgtgaacgatgtcgtaagcggcgtcgcgctagcgacaactagtagtattcgcttcaacatgtagccacaacaactaattaatcatttaacatcgctaccaattgccgacttctacctccagcaacaaccatggcaacatcatggccgtggtgactcgcctagggactttcgacgggtacaagactgtccaagattgctaagaccggctcaacgcactgacggagcacactcgcgcgggcacgctggtctccttgattgacgacgaggtgcggatcaagttaaaggagacgcaggacttggtccgagaggggatggcctcccaagaagcgtacgacggagcggccctggtccggtcccaggttctggacgatcgagtccgcatattggagcggcagtgcggcgagcagcagcagaaaatgaagaagctggacgagcgcacacaaatatgcatttatatctaaaacgaaatatgatttagtggctggtcatactaattaatataagaatgtactagtaggtcattcttggaaacaccaatataatgcgtggtagaggggaaagaaaagttcgtgaagcaattttgcgattccttgctgacactttacgtcccgttagtggaagggtttattatataatacaaaattcaagtgtttttcgcagcaatcagaaactggacaaatgtgcgttacaaatctaaaatatggtgtttcattttcaaattttaaaaaaggagctgcagaaattctaaacatggtaaactacactattatttcgaagtatcttcaggatggcagcgaatatggtacaacttccacctactttcaggcataatgcattcagcttcgatccgacattttttttcaggcaacaaaatccagtcccaacgcaagcagcttcggttctacattttctttgcgcataatgcccgtcgtgtattagtttttatcatcatatgagttcttcggggtacttacagttaatggccgattgcggcaaaaatcaagaattagcaatgatgaacagcattgggcagaactcagtaggactggttttcgtggagcctggaatagcagtccattttgcttcaaaaagcatttcgtactacctccgaccccaaaagttagaaaattttgtcggtttcctcgccatctcctggaaagccttgttttaaacggaatagagcctaaaaataaagtcatgtgtaatgtagccatatgttagaaatggcagtgtcctactggtcaatttacaactgacccttaggagtgaacgacgtctacgactaagatgctaccgtagttgtgtatatccccttgaaaatacgattgtcgtgcacataacttggtaaactggaatatatgtacacgcaaaagttaactatcagggagatctcgacaagcaccccataaattatgtggctggtaccactcgaagctaccacagcctttcctgcggattttaggccaggcgtgacgttcaaatcagagggcaccgaaggctgacttgggtgacgaattggtccatacggattttaggggttagatcagcgttgctacgcacttaaccccaacattttttgtccttgatttcaaaacaaaaatccgctcaagtacgatgtactttccggggggttgtccttaaaccgcaaaaaaggaccaaaatagacttggcgtttgtattgagtgtaatcacgcccgggtaagtatgaggtgtcatttgtaacaagtacatagactgtatgagaggtgtaacgtctgtatccacataatgaaatcaagtcaatgtgcgctttttgtcctagaattaaggacaaaaaccgaaatgtgatatgttatatatgacacttttcgatctgcatttttaccctgatggacaacagaggactgtgtgcagggcaccccccttgtagaacgaatcaagggctttctggtcatagcaataatacggtgtatctcgcaaaatcaataccagcataagcctctaacgtttggtccttttatttgtccttaatccggggcctgttggggttaatatccgataccgaaaccgtggtgcatcaaatgaaatttgaaacacgttgacttggtctcagtatccgcgatggccgaccaaccacctcgccgacttgaccggcgctcagtatgggctccgcaagctgggcgtcgcgccgtcgtagactccatgcttgaacactacgtgctgtgatgaactcctctagcgctgaagaagcatgaagaagcggctgagggacgcccaagtgacgtgaaaggatagagagctcagtagagatatttcgaagcttattagccttacgcctgaggtaagattggtaagtccttatgttaccgctcacacttccgctggttgcgttggataagtcatacgacatggagctcactcagtgtattgttcaaggtcctcactctacagaccagaaatgaaatgggaacggggaatctcccgttcagacaatcgtacggtagcgaatttccattgtccacactcagaaccccgcggcttaccggcgccctggcggtggtttcgagtcgttaactgtaatagcaccttgaccaccacaagcccgataaagcaagactgacaggacaaagtccttcgagcttcgagcgccaccagtcaaggccacttcaacctgtacaaagactgcgagtccggtgttgcatggctacatttcggtagtcaggcgacaaaacatccttttcatctgaccaatcagcgcctccccctaccctgaatttccatctgcacagccaatcaacgccggattactacccgcttagacgaccgccgtccttcctgcagtgcagccaacacatcgccgcaggtgaccgccagccagcagctggcaaaaggccacccacggcctgccttgagaaacgctgcgctgggcgggcggacagcaccaaggcgcggcggatagcaccaaacaagcagcgcaaatcgcgcccggtcactccgctgagctgctcgctgtcaacggccggttgacaggtgcgggtgctgtaacgggcaggaaggttcgctggttccgcccgacgtccggctcgcattgggaaaatgcgaggagagcctatacaccagcgagacggcctctgtctccgcggtctccactgcagtgccgtcctcgctcgctgttgcatgttgcggtctgaacgcgccgccggcgaaactgcgcgaataagccccatcgccatgcgctctctcgcccagctgaccgcgccgtggaagccctcggtttcgcacgccacggcatttgccacccacgcgcgccggccctaaatcagctatggccgcttcagtttttgggctccgggccagctgagcgccgccgcggactctacctaccgcgcgccacgtaccgcttccagtgggaccaagtacgccgccgagaactcgcctcggagcgaaaccaacctcaaaatgcagccttccaccactcatgccttggctcggaacagcgggttacacacagcatctgggtggtctcggcgtgagctccgcgcgaaggaagcgcggccagatggcgccaaatgagccgtggcctcgcccgtatccgatccgcggccgtggccatcgcatcatcgacggtctccgcgccgctggatgcttcatgcatgctgaaattgaaatttgatctatttcttatcggccggcgctggtgagcagtgggcctcggcagccgcggcaccggcaccatttccgtcttatgcgcgacgatcccatgcgagactgcgcgctcaacgcccgtgctggtcaacgtcacagcagcactcacttcgccaactcaaaagtatggcttccaccatcgaaggcggaatttccgggtttctcgcaggcgcccgttggggcagccgggcgttatcgcgctttttctcgctttttcggaaattctggccccgtctccgcacgcagcagcccacgggcactcacggcggcagtggcagggtttcacttctcaattgacttcgccgggccatagctgcgctccgtagaggccctgcaccactccgcggaacagtgaagcaaggaagccatccgcccagccacccagccagccatctagacagtccgagagaggagagatgcagagcccgcgcgagatctcgtccgagcgccagggcgcgctcacgcccgccacggcccgcctggtgaccaagccggcggtcgagctgccggagagcggggccacgccgcgcacgctggaccccgcggccgcgcgccaaccctgggccaacctcagcgtggacacggctgtcaacgcggacgaggacggcgccgcccacttgccattcggagctgccggcgccgccgtcgcctcctctactactaccacgactactaacgctacgcaggcctctacgaccagcgccgcgtcctcgatgcgctccggatcgggatccagccaggtgacgctacccgcgggcctgctgcccgagcgctacacggccgacctgacgcactggcagtcgcccgccgacctgcccgagcgccgcctgatggtccaacgcatcatcgccatgacgcgcagcaagcgcgtggatgccggcacctgcgccgacgcgcgcacgccgtcgctggccaagcggatcgagctgtcgctgtactcgcgcgcggcctcgttccacgagtaccgggacctgaacacactgcgccgccgcctgcagtcgctggtgtcgctgagcttccacgaggccgccgtgtcgcgccgccgcgcggccgcgctcatgtcgggccacggatccgtcactgcggtgccccagctgggcaagcgcaagtgccgctccatgaccccgttcggtgtctccagactgatgatcaagcggccgcgcgccgagtgcatcggctccacttcaacgtgcacgccgcgcaccaccgccaggatgaacgaggaggccgcgttcttcatcatggacgaggccatcctcggcctagtgttcgccttcctgccgggtgtcgagaccattcggtgtatgcagctcaaccgcttcgcgcgccgcgtgctgccccgctgtgtgttcacactcgaggtggagctgcgccagttacagctcgcctacacgctgcacgccgcggcggtgccgacgcagccgtccgccactttgctgtgccagttcccgaacttgacgagcctgaccgtcttcaactcgatgaaaccgctgtgtgaccagcaagaggccggacccgcactgcacgcctggggctgcagcgagctggacatctcgcacgacaacgccggcgaggaagtggtgcagcagcttgcggagggcatcgagctcggcgcctgccgacgactcaccagtctccgcctcgtgtcggtgttcaccaacacgtgccgcggcaacgcgctgcatctgctgtgcgcggctcttgtcaagggctcgtgccccgacctggaggacctgctgctcggagggaacggcttctcggacgtgggcacggtggacgtcgcgtggttgctcaaggtcgggtcgctgcccaagctggcacgcctggacatccgccgcaactacatcggcgagtcgggcctgaagcgcatcatggctgctctacgcgccggtcgctgccagcagctcaagtacctatgcatgggcggcaacatcatcacggacaactgcgtggcgcccgtcgtggagctgctctcgagcgccaagtgcccgcagatgcgcttcctcggcctcgaggacaacttcctgagcgcccgcggcgtgcagtgcatcatccaggcggcggtggccggcggcatgatgcccaagctgcaccacgtctcgtgcgacgggacgctcggcagtgacgacacccagagtgtgcgggccgcatgaggcaccaccattagacgaagtcaagtcaagtccactgcaacactaggcacaccaggcaacgcacacatcaaagctgaagttagaaattgttaaataaccagtagagaatcccgatgattttgtacatacaaacatgaagtgaattgacatgaatttcaagttaagattgtccgtttcgtatcgtaaaagttctgataagtgccagaatcgacctccttggtgcccgaagcgcccgcacctagcgaagccagcatccaaggccaggcagccggcgccatgtcgtacttcatcccgcccgtcaactacggcatgatcgaggaggacctgtaccgctcgggccagccgaacgagctcaacttccccttcctggagcggctcaacctgcgcaccattatctatctggcgctggaggagcccaacccgcagttccagagcttcgtggaggagcaggagatccagctcgtcttcctgggcggcaacacgcgcatggagagccgccgcaagtcctgggagccgctgtccgaggagacggtgctcgcggcgctcgacatcatcctggaccggtccaactacccgctctacatcacctgccacctcggccgcgatcgcacgggtaaaggaagggataatagtgcagcctccttttaacagtggtggctgacaaactatcaccttgatgctcttctattgcaggcgcggtggtgggttgccttcgcaagatccagggctggcacttgtcgtccatcttcgaggagtaccggcgcttcgccggcagcaaggtgcggctgcagaacgagcagttcatcgaactgttcgacacggacctggtgacgatccccgtgaaccctccgtcgtggctcaggaaacacccgtgagccgacaactacacacagacacacactactagactgttgcaacagaaaataacaacaaaagtcgatcttgcatatgaaagacagtgctgggcttgcattcaacagtgcgtcgaggagtcaccactgcatgtactcggccggctctttcgtcgtctcgggaggagcaagtcctcgcgttacgcttgggaatgaccggcccagcacctccaaaggcagcaagctacccgacgtcatagcacatgtgttgccagcccagctcgcaaggacgtgaagattgctgcgaatggacaccgacgagagccgagttgcttcttctcctccttattgctgccgtcctctctcttcttcttcttcttcttcttcaacaactcgctctcttctctctcttatcacacacaacggacttagcaccggaagccgccgacctgctccagcgcgcagtcgatctggtcctggtcctcgagctccagcatcttgggcgtctggtcgccgctgatgcgcgtgccgtccagcaggaagcgcagcgcgctggcgggcacgcccttgcgctgggcgtaggcggagaagatcttctccatcttcgtgttgggcttcaccttgaagaacgtctcctcgcccgactggtccttcacgcggatcgtgatggcctcggccttcttcttgtcgtcgttgttgctgccggtgtccggggtggggggcacttcgtccgacatgatgttattgactgcagatacaccagcaaccagtgacagttaggatcccaaactcacttggactttgtgggcgcaaggtcaacttctcctctccccctcggatcgccgccgccaatgggcagtgtgggacccggatagggcatcgagatgcagcccttgcaggcctgttacatgcagcgccaacgccatacagcggcagcgaggaggctgactggcagcaccacgcaccttcttccagttgcttgaatttcaaagtgagggtttttggccgtgccgtttctttccccaaatttccgcctagccaaccggggagcgtaccgcaaacagcgtgattgacacaaacaagatcaaacccgtttcccacaaataatagacccacacggctcaaaaagcgtcgacatagagaactcaagtcaaatagtggaaacgggtcgggtttaccctatttgtggggggattgaccaagactcctagatattagagagaccaatgagaggcgcgatttgccttcagaaatgaacttttaatgtggcataatcagttatttgtgggtgcctaagtttacgtattgtacacttattcaaggactctcgcggatcccaaaataaggtgcgcatcaccatattttgggcactcggcactttgcccaacagcgcgcacacggagctatcggccggagacacttgggcctgcacacagacgacatggtacgtagcgcgctgctcatgcggcgcagtcgagagaggaagggtccgtgctgacggaggaagcgtctacccgccgcagacccactctcgagctctggatccggagctattgcagcggcgctaacgtatcttggttcttcgatgtctgtagctgccgctttcgctgctcaagacggcgcagggccaccccatggtaagtccacacgaggctggggagcggacattgtattgtttaagaggcggctgatgcttgtgctgctgcagctggtggagctcaagaatggcgacacgtacaacggacacttggtcaactgcgacacctggatgaacgtcaacctgcgcgaggttatctgcacgtccaaggtgcggcgcgcactgctctcaatgtaattggctctgctcctaacaccccgggtttttatgctgctgtaggacggtgaccgcttctggaagatgcccgagtgctacatccgcggcaacaccatcaagtacattcgcgtgcccaacgaggtgggtacagatacaagtgctaattgtagtggtggtatctaatgcgcattttgtgtttgtgtttgtgctattcagattctggacatggtgaacgaggaagacttcagcaagcgcggtgggtgtctgctgagacgatgcagagcaataatgctcgtttcatgtcggttatgctcactcttatctatgcgtatgcgatgaataacagaccgccaagccaaccgcggacgtggtcgtggagctcgtggcggcttcggtggccgaggaggtcgcggaggccggggcggacgcggcgggcgtggcgatggccctggcggccggggcggacgtggtgatggaggccgcggacgtggccgaggtggaggtcgcggtcgtggccgcgggcgcggcggcgacaactagctagctagataacgaacaacggaagtgaggagtcaacaggacaagtacacttgaagacgcaccagcgatggtgaagtttgcagccagcttcaagcagctacagtagaggtaccaatcgaagtcacatgcacttttctctactttgtcaagtgtatattcgttgaaggaggcaaatatgtgttggtgttggaggcgaggtgacctcatagggcagtccgtctcttaaatcgctgccttgtcttgctaaaaaagaacctgcgtgatctaattacttggcttcggcgccgctggggccctgcgggttgttcttgatgaggtaggcggccaaccactcgatcgggttgggcggacgctccttgacgagcgccgacatgccctgcagcaggatcggcaccacggtctggtccaggtacgcgcggatgggcagcgcctgcacctcgaccttgtcctggacgctctcggccgcgggctcagcggccttcacctcgtcttcgtcggccttggaggcgggcgcctcctgcgccggctcgtccttggcgtcggcctcgggcttggcctcctcctccttggcgtcggcctcgacctccttgctctcggccgcgggctcctccgcgtgctcctcctctgcagccggggcgggctctgcgacctcctcggcgggggcgggctcggccgcgacaggctcctcctcggcgggcggcgcctcctccgtcacgacgggctcggcgatttctgcatagacaacaagaagagacggagtgtgagccacgggatcttgtcattagcagctgatgatggaggacgcaccagtcacgggggcgtcatcttccatgttttctgttgactgtgggggctgcgcgcggcgagggcgagcggaaattgacttggcacctcctgctgaagatcacaaatgccgctccacgtccgtgtcgactcccgactcggcgcagttgtttgggctagtgcggccaattgggcggttggattgggtgccgcaaatagagaccagaccctggaaacgacctgctcttggcgtaacgaccagggctccaaaacggcgtgggattgggcagaaagtgtacccccccgtcagtgtacccccaggggtacgagactaaaagctgtcctaccagcacaagtacatgtaacgttacttagtacaagatggaatgactccattgtttgccaacacaagtcttcactacgacggcataggcgctttgatggggcaatgtaggattgatagagcacgaagcgtatctgcgaatatttgccacattctacgtccgtgttccatcttcaaggtgaacccataagagcgaacccatttcctcacgcgacgcatcaatatatcgctgctgtgtatcacaacgcaattgacccggtagacaccaagtcacgcatgtcctcgtcctcttcgttgctgtgcacccgcaaccagaccgcgttaacgtcgcagtgcaattctctgtgcgctgaaggccgcccgtgcgtcgcgtacgctgccggggacgaagcggagtgcgtcacctcgctctccaccttcggggcctgcacggcggacgactattgcacctacgagtgcttcgccaatgggccggacgactttgcagccaatggggccatcgatttcagcacgtacacgttcctgatcccgttcgggagcgacgtggagccaagtgagcaggagttgggctggtctagtgaccaggaggccgctgcggatgcggaattggcggtggcgggcaacctgacgacgcagcatccgtccaagtccaatgacgcactgcaacacattgagccacttgactttatgacgtccactacgggggtcgtgctggttgggggctccagtgtctttggcgtccgtggaaaagtggcccgagtgcagcttccggagaaattgttcgcggctgatacacagctacaggcagtgtatgttagactattttgctctggttgagtgactaggtagataagtattttcttggtgtactgcagaacattggcgaacctcggcttggagcagatcctcgtgtcgtcgttgccgtctggactggttaacctgacgatctccaactgcctcatgacgagttatccagaggacctgcaggccatgagtgatcttgaatttttgtaagacgttttctgagaaatgctcgaccggtttgcgaggaagttgctgattgtggcgatattggtgttgatgtagagatctgtccaagaactactacggatacttcccttcagatctggaactgccgaagctacaaacgctcaacttgtccgctaacagtatcgggagtttcgacggcactttgccgagcctcatcacaatgtacgtgaaattgtaccattgcttctatgtctcctgagcaactaacaatcaaactccacaaaactgtagtgatcttgcgggcaacaacctcacttccatcccatcgacaattttcgatatgaaatcactgcagcagctggacctgcgtggcaacaaatttgctggtgtggaactcacttcgacgcagttcagctttctccaggatcttgacgatttcgcagtggattcatttggtgagccggtctgcaacacgaccgagaagcttgaaaccagctccagtacactcagcgtgtgtgtatccggtatcaccaactcgaccgaaaacgaggattcatcttccaacaaagcgctcatcgccgggatcatggctgcagtcatcgtgctcttcgtcatcctcgccatcatcttcatcttccgatgtcttcgtcatcgcgcggagcgtttaaagcccgacaccgagccagagatcatccatttgcagcgccagctcatcagtccgaccgaaaatgctccatacacgcacgcactcagtgcagagcgatattctgctccagactctgatgctgaagcagttccaaaccagcacgccttcccttacgatgacgaactcggtatgttgctcctgaatgtggacgatctcgagtacatccgcaagctgacaagcgaacatcgagctcgaagtaatcgcgtgacgttcctgacgagattccgtggctcacgcttccttgtttgcaagagactacagcaagaatcgatcgatgaagcctcggagacacaacgctttgctcaagaggttcgccttgctgcgactctggatcatccgcggatcgtcgctctcgtgggcatcatttggagtcgtatgtacggcttggaggcgctctatgagtacatggagggaggggatctacgctcacatctcgctagcgttgacggtgccagtcacgacttacgatcgtggcgttcacagagtgcgtggaagttgcaagtcgccttcgacgtggccgaagcgttggcttatgcgcacgcgttctctcctcgacttatacaccgtgacttgacttctcacagtgtgttgctgtcgtcaccgccagaacttcgtgctcggctcgacgaattcgtgatagagcagcaaggattccccagcatgccgactattggcatatcactccgagaagagaggtggctacctcctgaggtgatcacgggcgcagcagactacagccctgccgccgatatgtacgcgtttggcgtgattctgtcggagatcgacacgcactcgttgccctacgagaatattcagggcgtggtgagcggcaggcagaacatgagcgaagtggagatcctcgacctcgtggcgtctgggaagttgcatcctgtattcacgcttggctgcccgacgggagttcgagagctggcagagcggtgcctgagctacgacgcctcggaacgacccactgcactgcaagcggtcattgttctacgcacactgctatcagaagaccgtcggacctcattcactgtttagtttgagaactattgcgcatgaattcagtgtgtattgctcatcaattaacctcatcttactgtggcggtgggaggaggtctctcgtttgaacacgccgcaccgactcgcccgtgatggggttcaccccctcgcgcgaattgtggtactgcaggttctgagctctcagcatggctcggtgcttgatggcggcgtctgcagcttgaagtcgttcgctatctttgccgtcgttgtatttcagtgtcacggggttgaacggttcgccgcacttgttgcgtcgagctttcgagcccgacgctcgcagcgcctcccaccgacgcttttcctccgcagaagcagcgtccatggcctcccagcgacgcacgtcgcggttcacagcctctcgacgacgtcgctcctggtggattttggtgcgagtccgagcatcttcgcgagctgcacgctcctctccggcagtgtccgagtggaagcggtcggcgtcactcataaacccctgactctgaggcgtgtacaccagcatggcactacccgcggctgttgtgtcgacgcgtacgaagccttccttgcgagcacggaggcgctccttctcacgctgctccttgtcacaaacagcctcgcgctgctctcgcgtccgcgccgggatgttgttgaactcgcggacggaggtggtcgctgctggcgccttgctgttcgctggcatttctccacgtaggaatggtatttagctgccggagagagagagagaagacggcgagtgctaaaggagaagtggagaaggttgacgagatgatgcagtgtagccatttatagagacttggttacgttgaagttgctggaagatcgccatagcctatcagaagaaggtgaatatgcaggtctcccacttttccacgaggggcacgacgctgtcttgccacgtgacttggccagtctttttgttcggctgcgcttgagtgtcttgcccttgttgcggtggagctccagtaccgacagcagggaacgagtgcggcgacacatccacgccgttcacgtgagtgaggaagacctcgtcgcgacgcataccagcctcgaagcacggcgagccaggcagcgcctggaccacgatccacccgtcctgttgacgcagcggcttgagtccgagcgcgccgttcaccttggtcacgctgatggtctgctcgcagtcgaagctgaaccagagccgcacagtctgcacgaagcctcgctgcatttcgtccgggttgaggtgatacacgccttcatacaaaatctgaggcccttgctgcgagatggcgctaggacaagccgcagcaagcggcaaagtgcacgtctggatgctcaggatggtaaccggtctccctgcacgtcgaaagttgttgatgtactctcgagctcggttcgtcgtcacgagaacgtcttcgtactgcgctgtgggtcgaagcgagatcgacttcttctccttgagcatgacagggacccacgtgccgatgtgaatgtacggctcgtggtaggagccttgttcctcgctcgtttcgtgatggaaacctccatgcgccgcgttgcccagcggtgagataggcatactggatgctgggactccgtgcaacgcactcgcacgacggatctccataggctggaagggcgtagcgctgacccgacgaacgccgcggatggcatggtccgtttgcaggttgaggtcgctgcgttggcggaatggactgccgaagatgtcgagcacccagcgcgagtcgggctccacgaggctgtacacctggccctcgagctcctctgcggaggagccgtccgggaacgtgtacaacgcgatgtcgtctgcagacccgacggcgaagagctcttcctcgctgtagagcgcacgcgcgagccccatcttgacgtcgctccagctctcgacgccacgcagctccgccggctccagctcgaagcacccgtcgttcttgcacaccaacacccgcatgacgatcgaatagaggtttgtgggtggtgcgtggtggggagaccacccccaagagaccgtctcaactaactgttccggataagccccaagcgccctaatgacgcgaggacgccagcggcgtttcacgcttggcgaatatagatcatgaaagctgaagaattattaatacacgaagctagcattgcggaggtagagggcggtagtggtttgatgcacacagacaaatggcctggcccgataggatgtccgcgttaaacgaaatgctgcaacaacacgaccgaaaaagtatccaacgaacgcagtcatcgtcgtgaccggagttcgaggccacgtcgagatgcgaagcagcaaacgcttcgacgtcgagaccgcacgccttgatgtgtgcgccgccgatccgatttgcaggttcagcttgaagactgaagcaacgtggcgatggccgcgagcgaacaacccaacgcgccagctctctggtctctggtccattagccggtcacgctgtcgtccacgagaaggagcgcgtggcaggcagtcaacatcgaaaggtgtgtgtggagatcgtctcgatctttggctgagcttagcggcggacagcaggcaatccgcctggcagtgtctcgccgattacgcgctagggagacatgctctacgccggctgcagtgtgtggcagttggaggcgcaatgggttttggggcgtgtgtcccagcagtgaaagtcgactggcgagcgtcgtcgtgttcccaattggcagcaacatgctgaggtttcctagcgaaaggcaagatggcactgccacgcaggactcgactcggcctgcagcgtcccggtgtcgggtcgcgggatcagctggcccaggttgaagttgtgcccctcgagatgcgcttccctgggctcggctcaacagatgatcagcagcggcggcaacgagggccaagcggcgatcacaaaactaatggatttggtcccgcccgctcagaactcgtgcatgcaaggggaaccagcagcattgcacgtccgatgggcgttttccaacgcgcacgccagcctcgcgcgaaggtggcgtcgctggcaccgcagaggcgaccgagtcgatcggccagaggctgtcttagtcttgcactgaactgcgctcggcgacggcatgacaagtacgacaagtattggttgccttgctatcgtgctcataaatacgcctcgccatttggccccaagcaacctgcgttttcttgcaaaaagcgctgacatcgtcgggcggtgacaccgggaggtcacggcctgcgtcgactgaattggggtgcgtacctggtagattttcctaacgcgacgcaacaccttcgcatggagtgcgcttcttgctgcgatcatgcacgcgcaaaagtttgacttgcattcactatccaattttagtccgtatcaattcgcacaacgaaattccagcccgtcaattgggttcgcatctagatggctgcttggcatttgctacgagacaaccagccttatgaaatgctcagttgcaatggcaataatccagcctcgcttgttttgcgcaggtaccacaatcattggtgctcacgctgctgcgtcttcgaatagaatacacccgaccgagaaacgtccatcaaccctccacatcaatctcgcgtctattgtggtttatcccgctgtgtggccgcagtctgttcgcccctcggatctcccagcgaatgcctcgctcgcggcccttttcggcctatttttgggaattggcttctggaatacagacaacgacttacaaagccgacatgcttaatgccatcctcctatataaaaacaacgataaattccctcccgtcaaatctgtaaaactgtcataaaacacacggtgtgttgcataaagtacacaataaagcatataaagtacacaaaaccagatggtatacaaagatgaagtcatttgattgaatctgattggttggtttgctcatgttaagctttgcttgacttcgtctgccggctttttgtgtctgccggctttgtaagtagtccgcgcccttttctctgcaccattttacaagtcattcttttcgccgcggctatgcacgaaaaatccccgtctgttcacgccgagatgctctctcatctgctgcacccgactccaggcatcccatctacactaagccgagtcggtcgcggtagccaccgccgttagcagcactctcccttccgcacacatgtcgtcgttgcactttcatttcagaatccgccgcctcgagctcacttctgtagcgacgcacgtattagtcgttacgcctcacggatcctcctcgctgtttccgacttcagccttccattcaagcccagccacccgattgtatccatgatggagaacccgctgcactcgtcgacgctgcccaaggccggcggcctgcgcaagtccagctccacacgcagcctggcgtcgctggccgacgtgcaggcgctgatcctggcgcaggacgaggacgagcaggcgcagcagcgcagcaaggcgctgcagaagccgccgcgccacgccagcgtgcccatgtacgcgcagatcctgctgcagctgtggcagcgcgagctgcagcgcaacgacgtggggctcacgagcgacttcttctacgacctccacggcacggaggagcagggcgcgcagctcgtcggccgcatgcaggcgctcggcttcaacatcacggtgccgcagttcttgtccatgcaccgctgctccatctactcggtgctgctggtggcgttgtgaggcgctgcaaaacaagactgcaacccccaagaagaagaagaagaagaagaagaagaggtgtctattttatcggtcggctggctagtccgaccacgacgttccccacacccgttcgcccgacctctcattgtcacaagccttcagatgcaagagcgcggcttcccgtagtccacgagctccgtcccccacaccccgccagcgccgccctccagcgtcacccccagtagcatagcaacgataatttatagcgcgaacgagcattctccatgcaaaaagcaaatgctgcgtcgtcgtgcatcggcctcaatcaatacatgtacgatatcctttgaattccaactgccacgacgagttttctcatatttattcactcccaccaacttcctcttcttcacttaacgtccgcggcggaattggctctgcaccttgctcttgtgcaggcggccgagccgcgtgttggcgcgcgacgactggcgacggaagtcgctctcgccgcccatcgtgcccggatccacgtactgcggccgcgggtagcagatcttgtagtgcagcgccacgtccacctggttgtggccctggcgcacagcttcctcgatcgcggtgggatccctcagcgaccggttctcctcaaagcgtctcctgcacaccattgattccggcaaaaggttagataccttttccacattttaaccaccagaacattcctccgccgaacgcaaacactcgcgcaagtgaattgagtgcattgcgtcgggcctgatgcctcacgacagagactcaaagcttctgtacctggcctcggcgcggatccaatcttgctccacagcgccgccttcccctgcattgcattatggtcgagcaccaagagcgagcattgacatggcagagagagaatgaggagccgctcgctggggatgggacacacaggaaccggaatgacggccaactggctggctggctggtccctaatgtgctgctgcttggtggaggccacgtacatgtcctcgccacgcggaggatgcggcggtaaagcgatagcgacatggcggcaggttacggcgagtctggcgtggcgcgcgcgctggtcatggagcaagcagcgccgcctcgttccagtggtgaccgctctggattggctcgaacaatgggccgcacgttaaacgagtgtcgcaccaactggcgcgaccttcgcgttaccgggcggtggaccatactcacttcaagttcaatctgagacccgacgctaagaagtgaccatttgggtacagcattacatgtgtagctttgccccacagatgctggaacgaatgcatgagatgcatggctaggaagacctaagtgctgctgccccgcacgcagcctgcagcctgctgctagaggcgcaggccgtgacctcccggtgtcactgcccgacgatgtcagcgctttttgcaagaaaacgcaggttgcttggggccaaatggcgaggcgtatttatgagcacgatagcaaggcaaccaatacttgtcgtacttgtcatgccgtcgccgagcgcagttcagtgcaagactaagacagcctctggccgatcgactcggtcgcctctgcggtgccagcgacgccaccttcgcgcgaggctggcgtgcgcgttggaaaacgcccatcggacgtgcaatgctgctggttccccttgcatgcacgagttctgagcgggcgggaccaaatccattagttttgtgatcgccgcttggccctcgttgccgccgctgctgatcatccgttgagccgagcccagggaagcgcatctcgaggggcacaacttcaacctgggccagctgatcccgcgacccgacaccgggacgctgcaggccgagtcgagtcctgcgtggcagtgccatcttgcctttcgctaggaaacctcagcatgttgctgccaattgggaacacgacgacgctcgccagtcgactttcactgctgggacacacgccccaaaacccattgcgcctccaactgccacacactgcagccggcgtagagcatgtctccctagcgcgtaatcggcgagacactgccaggcggattgcctgctgtccgccgctaagctcagccaaagatcgagacgatctccacacacacctttcgatgttgactgcctgccacgcgctccttctcgtggacgacagcgtgaccggctaatggaccagagaccagagagctggcgcgttggttgttcgctcgcggccatcgccacgttgcttcagtcatcaagctgaacctgcggcgacacacacatcaaggcgtgcggtctcgacgtcgaagcgtttgctgcttcgcgtcccgacgtggcctcgaactccggtcacgacgatgacttgcgttcgttggatacttttcgatcgtgttgttgcagcatttcgtttaacgcggccatgtatgttaccagtttaagctttccgaccaaacctttccattatgttgccatgacttagtctcctttttcagcttcatattgttcgcattgataggtatctgtaccctgtgctctagcgcggcgcctgctaatcaaagaaccgagtcacaccgggcgtcggtggcggactgccaccatcactgctgggtcacttagcgtccaaactcgcaccacggcgtcacagtgttgcaggcaggtgtagatgtaggcgttctgttggacttgggtcgataggaagtccatcatgtggagaactcggtttctggtgttaggcgccacacaaattctcccccagcgaccttctccaagagctccaagttcgcgcatgatatcatccacgaaggaagtggccgtaacctcgttatctggtcgagtaagccactctggatctggattgccgacagcagcgttcaaggctcggacaagggtgccgtttatcccattccagcaaaacaacgggatcttccgttgtcaccctcacttggcgaagataagagcatctccagcggttggtctcaaacacggttttatcctaaaagtaacgctgttaagacttggccgagacttaaggcttccaccagaaggtcctattgcaggttttaacttcaccgggacctatagattggctttcgagtcttaaaataagaccacaatcttaatgccacccatacaaaactgaagagtcgccgtatttaaaagattacaccaagactgaatgcaattttcacatgcgggaatggacttataagactcgctttagaactcaccgctggaagtaagttggtctgcgcgggtctcaactgtaaaattgtggtctcaaagaccctgttacgtcttaggataagacccaccgctggagatgctctaagcatctaatcgtatcaggacaagcttattcaggagcaataacggcgtacttcgtgtgaccattcagttgcaagcacagcacttgggggaggcaatccttgaaggatagctgtagttaaaggaaaaaccttgaagcctgcagattcgagcgcatgcggtaaagcgccgtcaagaggactgaacagtccatctgaatttgaaagtaaattcgttacctaattgcaagttcacagagcccccagccagcgtcgcagttccgatccgcagcggctattggtagaactgagccacattgggtgtcggtagcatgtccatggggactgccgccgccgctgttccgcgcttattcagcatcgaaatgctcaccacgacgccatagatgcaggcgttattttggacatggccagtgagagagctcaccatgcgataaacttggttgctggtattgggcgccacacacactctcccccagcgacctccgtcaaggctccaagttcgcgcatgatatcatccacgaaggaggcggccgtaaccccccccccccgctcttcggtcgagtaagccacagtgggtctggatttccgacaccagcgtttgaagctcggacatggcggagcaagttgctttcatctcagtccagcaagatcgcgggatcatcctctgttaccctcacttggcgaagataagcatccacctgtcagcgtcgtaataggacacgcacgcctattatactcagcaacaataacaacacactacatgtgcttattcagttgtaaacacagctactcacttgggggaggcaatccatgaaggatagctgcagctccggcgttatcatcagatcgtgctttggccgagcgagagaatggcgtttgctatgttgatgacttgggacgtggggcttttgatggttgcttttcaaccgtgtagctccaccaagtattcctcgattttgatggcaagccatgacgatacgcgtggaagcagcaactgtagcgaggcaatggagggtaagacgctgctcagtacagcgcaatgagtggagatgcgtgcagcaaagtacggccgtggacgggtgctcttccactccttgagggtccgtggcgaggtaaattacctcatataattgattgcttgataacttgatggcttgcagggtgtggtcaagtgaatttgagctaggaatgttgtggtagacttgttttttcgtggttattgtttctgctgcagatgtcgtgggatgctgtgctgtagactttagaatgggttcctccagtctagagaaggtgaacgaagttggcgcggcgtactcgggtgatatttatcacctgttactttagcactcttcggctgttgtgtctctccagcccctgtccacctgtcgttagccctgctcggctgtcgtctgttaataacctttgtcaaagaatatattatgatattgcgaggggtacatgcgcgactcgaagtttacctccgtgagggactctactaatagccgagagcctgatcgtggttcgttcggatgcgcaaggacagtgggttagtccagagcttacagtatcgtggtggcgctgtattcttgggctgcagctctctaaatgacttccggttgcttgtagctgacttaatttggtgtatcttgttcgctctcagtcccagctatcggcatgatgttcgattgcgaccctcaagcgttagtacgagatgtttgccctgccgattgcgtatttgcactcgccactaacctgatgactgctaggtgcttgccttgcagtcaaagagcactcgcaacaggttttcagatcaacaggttctcaaacttgaaaacctgttgaaaactaacagttgaacagggtcgccaacaggtaagtaggggctgtgagctagcaacagcctagtagtggtagaacaacaggaattaattattttccggcgtactcgaggatgctggtccttaaagatgtgtgcaggcttgatacacaatgcgaacagcattgtgaacgtggcgcaggtgtgggctagtcgagggtacaagttgtagtgcgggaggtttgctacagatcccggacacgccacgattcgactgagctggcagcgtatcggatcaacaggactgcaacacgcaggtacaatttgattagtagcttgaatcaacgcatttgaaccgacagattcgtaccagaaagctggaaaggagcagcacacacttagcgccaggtggaacgtcgagaataggatcgaaacaagcatcagaccagcgatgccctcatgcaagcacgagtctaccatcgtcccgtacgcgaaggtactggacgcgcgtgagaacgtgcacacgcagtcgagcagcagcagcagggctgctagtaactgaggaatggcagtaagcaggtacttgagcgacaattcgtggtacacctcgcggttctggagctgtggaagcagcatgcatattgtgatgaatgggtcatacacagcaacacagagccaaacgtacgtcggtagcatgataccattgacacaagccgaagcctcccagccggaaacacgataatccttcgagtgagaccttcagctgcgcaaaatgtacaagcatgtcagtagaattttacgagagcactccagcccaggaaggaaggatacagacgaagatacagcggcaggggtttcatctggcacaggggtttactcggtgcacaagttgtcttttctcctgtcaaacaagaatttaccatcgctcgacgatctatggctccgaagtcgacaagtgtaggacctgtattttcggcaacgacgcataatatatttccgcatgtgcagctagttgcactactcacttaaggcaggcaatcctgcctgtcagatcgttgtcagcctttgtacttccaggaaaatgggacgggacgattgttctcaactttccaagcaagctcaaaactcaacaacccttcttggacaatggtggaaacgcgctcaagcgacccagagcagcagttatcgttcgattgtctgccccaagtgagtattctcttcaactgcacgcattgttgctgctgctgatcaaatgtttcttgaaatggcaggtggatgcttatcttcgcggagtgctcgtggcacgagacaatcccgcagaaccgccctgaggcaactggtacgaggtttgaacgctctgcgcggccaccacccagacccagtgtggcttactcgacgcaacaacgggagttaccgtcaactctgtcgtggacgatactgtggctgcacttgaagaagttgttggaggccgctgggggagagtttgtctggccccgaacgacgcaattcaatacggaggaattgtacgctttctggctacctacgttcaacacgacgccttaatccaagaatgtctggctggcgttcgctgtgacgcggtggtgcggattacggcgctgagtgagcgtggatcagcggctgccacacgcaactttcctgatcgagagcctccgcatggtactagaaagttttaccattaatttcaagaggaccttgaactacagtagtagggcaacaaacatgcattccagttttgatcgtcaaaacattgatacttgaagtgacttactatactctcaacactcgttccagtacgttgcacgcttttccagctcctggaaaattgcagctgagtgcaagcaatggtttgcgcaaataaatacatcgatatgtgggagctcgctagagcgacatggactgcttctcctcctcgtcttcaatcaccttcaaacgcttcgcgcaccgtttcaaccttcgtcgaacggtatgctcaacctccgatccttgatcggtcgcgggcattgcggccagcacatcatacgccaacttgatcgacttcatcagccgttccccctcgtcatccacactttgcacgttcccactctccacaggcacaaccgaagaatccacgcaactcacagacctctgctggagactcgcctgcacactctgctgcatctgcaatacacccggcgactcaccctgtccaaaatccgtctccgtcggcgccttgcacacaaccgagatcaactcgggcttgtcatggagccagcgtctcaaatagtagacgtcatgtcgccccgaacatgcggccagctccgccgcactatccccaccagcaacacactgcgagccgaagacgcagacgtaggccaggcccagcttctcccacattttccgcagcttgtcgcttgaatgggcaatgggcgagcccagattgaagtccacgaacacgtgatcatctgggtacgcgacccgcgcgtactccgccttgttgctcacaaactccgccctcactttgtcccaaaaagcgctgctgccgtccgcattgcgcttcctgagtgctccgtcaactgtcaactgcctcaaataaggcgctaattgaggcgagaagagcacgttcgtgaggcgcaagttgcagttcttgctcttcctggtgcgacccgccgggtttgcattgatgaatacaaacccaccgccgtctacgagacccgcggcgctcgctgtcttggcctccagcaacttaagcagcagctccgcgtacccggccttggactggtacgccgcgtactccttgctctgcgcgggcacgccgaagccgccgcacagcgtgcgcagctccttggtcgagtagctggcgatctcggactgcagctccgcgcgctgccctgcgtcgctcagccgctgcagcgcctccagccgctcacggcgtgcggtcgccgcccccacattcgccatggagctcctggatgctggatgatcaacggtaccccattggcttaaaatggttgaaacgataagggattgggcaaaatgggggaggatttgagccagttataagacagatcaccaggaaaaatacgacaagcctcaactctaacgaacacttacgtgtactttgtcgttattttatgttgttttaaaaagattaacgattgcgagaataccacttgaaatgatatattgtgagaaccggctaaaacgcccatctctagcaaccccttattagatctcaatagccaaattaatcagagtacaaatcaggtttgaaatcgatcgtgacacttgcctgcgcgattgcccagtaaaaggtgagcattctgctccaaacgcggctatatcgactaggtctccataaaacggtcgcctaatctgcacatccactcacatatgtatcgcagggagtcgatcgatttgtaaatcgatcgagctaaatcagggtgttaatcaatcgatttacgagcaaaataggcaaatgaagcgggtttcacaatacttcctctggccgaaaataaacgcaggtttcagaatacgtcatggtgattggacaaaaacaggtattttggtcttcgcgattggcttataaagcattagccgctccatccgcggggcttgctgcgaagccctgtgcggttaaggcactcccaacggcagttcccaatgttcccgctctcccatgcctcaatacaaagtcccttgaccatcgtggctcgcaaaaacaaccatattcgcgccacagtgactgaaaaacggtgctatttcatcgccgctgtcacgtaccttccgcgaggcaaaacgtagctgttactgatcgctagcaactccaaaatggtgtcacggcgctctttaaccatagccatgagattggtggtgcttggcgggtaatcggtgctctagtagactcgtggcggaattcggtcaaatccgcagttcgtaagaactgtcgtttgcgcccctgcggatgtttgagataatgcaacataaggttttatactgggataggaagcgacgaagtgctgatagcccagcccaaacaggattaattcgggcgatgtccccccgtccaatcgacaccggtgatgaaccggtaacgtctttaggtcaatatacagtaagtgatgtctattgaccgagtgttttagacttctcaagaatgatggaggctgctccagttcatttgcaaattcgtcgagttagattcgtcatagattttgctctgaaatcggttgtacgtcgtgaccatagaggcgatacattgtcgggcagattctgcggctgcgaagcaggcgcaggagatgcccgtggagcgtgcggattgagtttatcaatggcgatcaaaggtgagttaaccaatcctatcccagccttcgcgaagccctagttccgcagttcgtcagaactgtcgtttcgtatgtttgagataatgcaacataaggttttatgttgcattatcggttaaagagctatttgacacaacagcaatgacagttgtacagcaattgtattacagcacagcggtgcaaactccgattcattacagctcaaagcaagcatgctttcggcgacaagctgaccaggcagcagcaataataaagaggggtgatcagtcagtcaatgcaatttgtgaggaatcgaccgaatcggggcagcaagcgagcaataggtaggtcgccgtcgtatcggctaagttagtttaggcatgtggctgtcatttctaagatacgatgtcggacgccacagcagcagcaaccataaaccgtcgttgagtaaaacaaaattatcgctattaattaatggtcgtgggtgcgaactgtttgttgagagtcgactttgaagtgaggagacctaaacggcatttaaatcagtatagcaattctacaaaatcaagttgaaggcgtcaaatttggacatatacaccgaataaccccagaaaataaacacattatacattctgaaccgaagctcagtctggcagcttaaagctgtgcagtatgtaccttgaatagcagtaacgctagtgtgagttcatgcaatgaaatgaaatttgcggttatgacggctgactacgcccgtcgccgcgcactgctgcagcgcagcatacggggactcccgcggtagcagccgaatagtgtgagttcacgttgatccgccacggcagatcgagcagcgtaagccatccagcaaatggacgcatgatatttcacagtacaaaaataagagcaagcgctaaaattcaagaatgtcatcacgcaacgcgcttctgcggcaagcatagcgctattaccacatagtactactagtagtaaataagttttctactgtgcacgttttagaatacagtaaaaaaagaccgaactgcgaacaccgcgggccaaagcccgcaaaccagtgagctctcggagtagcgtcgcgtttgtgatcatagctcagtctccagatcgaatctgttcgtaaacgccatattagccaatagcagagatcgcggtgcgtattttggtccaattagggtgaccgtaccggtagagctatccctatattgaatttggcgggcaaatcatgtggtaattgtagatttgacaatggcgagcgaaagtttcacagcgatatcgctattttccagtcacacacacacggtagtaatgcagcgtgtgttttcctaggcggttttggtgaagatgaagccgctttcatggctgccgattgaaagaggaccggtggtacggagattgccttctcatcgggggcgtctcgacgtggtcgtgcgctaagctaagccaaacatcgcgctgatagtcgcgttagactgcctcaagggttcgactcggttgcaacggaccaggggcgtaactaggcccgattaggggggggcacgccccccccccccaaacttttgcctccacctcgctttgaatgctataatccatactattttttgccctagacccgtgccccctagaaaaagggcggtgcccccccccctagaaaaaggctctggttacgcccctgcaacggacacgacatgttgcgtgggcatctttactgtgttccagctccgatccaggactcgtagaatgcacgtcctatagactgcggtcacgttccccgttgctattttcacgaccaaatttggccgcggaaatagctctgggatcgggaagctatttttgatttggcatttggcaatacccccacctgtagccaaatcagagccaaatttggcatttgtcggctggatagctcgacgggtacggtcacccttagcatgcaaaaaggccttgttttcgtagagcaatgggcaaatgatctgaaacctgcgtatatcatcggccagaggaagtagttcacaagaagagttcgttcgaatccgattcgttgcttgaacgaaaacaacatgaaaaaagaagctttggaattacagcagacaaatgggaacaaggtcagtgtaaatcaaactcgaagattttctatggaggggagtatttatgatccttgcgtcgctgttctatccacaacgctttcgaagtttttctttcaattcgctatattttaggatactctcaatgctgatgttgctaaaacactgcactacgtatctctaatttgttgttgccctcatcgccgtcttctacctcagtcgaatgtcatgactcactgaagtagcgcctgctccttgccctgcttctgctgctcctcttccccctcctcttggtcctggttgcgcttctgcctttgttgctgcttttgttcatgcttcctcttctgccagttccacgcgagaccccccacgagtagcatgccgatcacactgccgatggttgcctttattttggttcttatgcagatcaggtctaggatttgaacatgctgattatgagaccgaatcggtagacctgaaccaaacagccacggtagtggaacatggtactacttgccaccatttgtacgacctccgttcggctttcctgccgtagcaagcatccataatgctacttgtacatgaaggctgagcatttggacccactgctttaaatgagaaggcatggtgcaatgagcggagcctatcattgcattagtcgcttcacagcgtaccgtggtgaaatggtggctacctaagccgcgacggaaggcgtttgctcagtccaattaataaaaacgatgggcttacacgttttcttaagagtgcagtgactacgcatttttaccaaaccaatgcagcagctcaacgctggctcacctcggtcgatcatcattgctggcatctaactaagtacttgcaaatatgttatttgtaatagttttccattgagtttgttgccgatagtttgcggctgcaagaagcgaatacatatcctttgaccatactggacgtgtgcttcgtactgatagcaaacgatatatggatactacttcctagagcaagaagtagtctcgaacaggtagctgtagaaactgcgtttaaaaatctaaaatataacctaagtagttgatcatttgttttccgttctattccgtccgactcaactgaagcgcatcaatcgccagaactgagtgcttgcgcatctcgatcggtatggtctccaattcagcctgttgccgcaaaaataaacgtgagcttgacttgcgtaggcgctcgcaggaaattccagcgccgtccctattacactcgctcggagatgtctacactatcgacgcaccgccctcaccaccggtcttcacacccatgccgccaagcacgtcactgttggtcacattgctgatgctgcagccatgaggacgtggctgcccaccgcgcggtgtcgacagccttgaagttttcatctgtagacgacgcaatgggcccgctcgcctgtatgccaacccttgacacgttgccagcgctgtgttgcgcgaaacacaacaccagcactgttccgctggccacatccgtcccgctgccgtattgaacggccataccacaatctgcagccgcttctcgtgcctcgcttctcttcggcacaccggagatctagaccttgcctacaacatgtacaccgcatcgacatcgtcgtcgctcgtcgcctattatcgtgcaggccttgtgtctggcccagcacgccgtcgctgtcggtatccttgtccaccagaaacaccacgccgcgccgcgcacgtagatcttcttgctccacacgggcatgatcatgtcgaagcatccgatccacctcagggttggccccctcgtgcgcgctggataggagacgtagcacagccttcacgctgaaatagacgctcggggtccctaacgtgctcagcgcagcagtgacgagaggaggctcagtccatggcggtgcttgggcttgaaggctcggaatcacggagccgtagggtgctggacattcctccactaaagctcgcgtagcagagtgaggcaagactttagggcctacgtcgccagttcacaaacaaatgtgatccaatcactggatcaaagaaaagtacggtatgataaattcctctgcataagacccatttaaaaatcttccactgccgataacccagccagcaatcgtgcctcctgagtaccctttggtgtacaatcttctctccaccgcggcacccctgaatgcactgctcgaatgtttcacgaatgaaagcagcagcgcgtttgtcagcacgaattgtccttgcattgggatcgggatcttgttcttcacttgagttgggctctgcgttttgagatgtgatgggctaccagtgatgttgtggcataagatcacatgactggtgagtcacgcatcgtgtgagacatatcaaacgaaatgataccaggtacacttttaagtattaaaatacatgcataacagggattgaaaagtctgcatagaaaatacctattatactagtacagtaatagtattttgatagtatcgtttaaaaaatcgcaaaatcggctactagtacaaaagttattcagagttcgtagacaccaagacatccgcaacctgcagtgggtcttacgctacttacacagtaggcgtcgatttgcctcatagttacgatggattaagctaaaaagtattacgatcacactcttgaaagatatatcaaaacgaggaagttttactagttgagcgtagcattcttcctacgtcaatgacataaaaaaagagcaccaatgtcaattgtgtgatgtgcacatgggtcgattagtacattttgggggcgtcgaatcgagatgattatcttagacgactcgctgatagattttcaggaatgaatttatgtatcatcacgcggctgtgggcgcggccaatacatgtacagttcctgatcgggttgcacggtccgtctcactatgaaattcctagtaggatggccccttacatgcagaacaggtttatggacaatggtctgtagcaagtgcgcggttgttgatcattgcccgtgagggtaacttgcccgtgaagaacatgcacacgccaaatgagaaatattgtcgtgtaggaacacgcactaaattatataatagcacactttccccacctacaacacccaccaagtcccgatgactcaatgggcttgttagggttagaacctgaagacccaggaactttcccttgcaccgagttgatgtttcctttgtgcaccgtgtttccgcttagtcaactgacggaaacccagcgtcaccagccacgagcaaaggctggcacgctctcacacacaatataaacctcgcatgccctcaggaaggaagggtcccagccagtcacggcttgatacgagggtgccggaggtatactctggcgggaaggataaatggagtgcgctctcgctcctccactacacggcgatgactcgcccttcgtatacacggccacctcttctcttctcttggcctgaccacgggtaaacacacgcttcgatactagtagtaggcgtgtccaccggcagtcataatcctacgaacaggtttattcaattgctacgggaactcaccgatagcccggacgtcttccttgagtggttgggaggaaatcgtgttctcgtattgttgcccaaagggcttaactgttctatcttctctttcctatctttcaatacaaatatctagtctagacatgtccgttttggatcttccaggtaaccacccgactcttccaagccctcttgaaggctcggacggcctcccgatgactcgaatagtcgccttaggtgcggaactcaggccaaagttcgccgtaggttcgggtcgtccttgaagtcccggtgttgtgtgggtacaccactgctcgaccttgggtgtcgacgagtcatcgtcattggtccagactggccaatcagcagccgtcgaacgccatcgaacgaaaggcgatgtgccttgacctgccagttgagttgacgccgaatgccgcgtgactgccgtaagcttcactcaactttctcgacaccacaatatcacgcatagtacacaatcaggttaaacgcacgcagctttcaactcggcagatgggacatcaactccaattttaaatattgcttgagaaaacgtaacgtgttcgtgattttattgatacactaaccactgtaagtgatatttgctgatctttcatagcattcacaatactacgtagtaacaacccaagagaactactttgctaccagtttgctttggatggcgtaataaagagaagaaggcctggaatccactctgattgccaaaaacgaacggatggaagcagtttagtctacaaattccataaatcaaactagacactacatgttaactaccacacaattggtgcttggtatacagtaaatgctgtgcgtacactaaatatgtagtgactagaccgttaaaattcaactgatattaccccatcccaaacctaaagacttcggtgcaaactcagatcatttttatttcaacacgtacttggttagatgacatttatttgaggctgatccactttgaagatctgtattgaataaaattttttgggtcgaatcgagttgatgattttagctcgatattgaccgcggtctcggttgaagacccgcagataggatgtcatcagcggatttatgtatcacgcgggtgattggggctgtctcattgggaatggccgaccacacaaaaaaattagtaggaattcaatggaattagccatagctctctgtactcgccgtgtaccgagtatgagggagcgcgtggttgaggttttgccggtctagctccaacggagcaataccacgctgaaatattatcgtgtggcaaataagatattgagtgcaagtagtagacatcataattacagattccatttgaaaatcgcccaggagatattcatcacataccgaggaatacgtagttttttcattgatgggaaacccgcggtctcgatatgatatgtatgcaaagtcacatgaagtttagcatcagttgtgtgggatatacctgagtttagacaaataaaactttgatattgtgcggggttgcgcggataagattctagacaaaatatgtcactcataaagtgtagagcctttccttaccttggaagtcagcactttggcgatgagcgttgggaggtgcatccgaaatgaaggcggccaaaaataccgttttctatttatttttctacgagaccagaatatcgtgaacacgagacgactctggcccctgggtgctactgtagattttccaggatgtgcatgaggatttgttggaatgcgtattgcaggctgtcttcaactgcattgaagttcaagatgaaggccttgggaccctgcgagcctggataagagcagcagcgctgtgaagtatagtgaaactaagtatgtagggtctatgtgtgagaagctgctgaagcctgcttaagtagttgacgggggctgcagcactaacagtcgatttactttctctttcatctttctcccccgagtgttggctggtggccatacggatcgagtgcgacttctaacagggtactgagcccaagtaccgtgaaggtcctgctgcagcagaagtgatccaagatggcgaagcctctcaagtacacggcggaggggatccccaagaactgggatgaacgagactggcagacctacaagtgggcgatgaagaccgtcttccaggagaagaagctcaccgagatcgtggagggttcgattgtgaggtcggagctgtcgacggcccagaagcaggaggtgttcgatgagaagcagacgcagatcatgcgcatggtggggtcctcggtgccgccggacacgctgcaccagattcgcgacaagaccacggggaccgagatgtggggcgcgctgtgtgagctctacgagggcaagaccaacaagacggctatggcccacagagttcccaacctcaggaatgatctctggagcacgaagctgagccctggtggagatgttaataaacacctgagctaaatgttcaatttacggactgagttggcttcattgccgtataccgtggaggatgttgacatggtggagatgctgttggagtgtgtgccgaaccagcccgagtttgagaacatgaaggcagcgattcggtacaacccgaattttggcgctctcaccccgagtggagtccgtgatatgattcgtgcagctgattccagacagaaggagttccgtggcaagaatggcaacggacaacgcggaagtcagaaacacggaggcaatttcggccgatccaaggacaaggacagcaaaagtgatggtcagcagcaggatgcagccaaggacgctaagaagaagaagaagctccggaagtgctacatctgcgaaagcacagaacatctcagagctgactaccctgatcgtgcgaaggggcctagcggtgacggagctaatgcgactgagcagaagcggaagcctcgcgggaatgcgaccatccgcagagacgagagtgagccaccacagccagaccatgaagacgcagatgttggggtggtgaccggtgtgctggacgcgatggtgatcgatgccggtgtggatgcagagatcaatgatgaaaactatgacgttgcaagtggtgatgcagttcaagaggtggataggaccgatgatgaaaatgaacttgcgattgataccagtggtggttggtggtatttcgatacagtggcaaatgtccatgtcactgggaaccggtcctattatgtggcctttacggaggacacgagccagtcggaaagcattcacggtgtcactccagccctcgcatcgcgcattgcaggtgtcggaacggtagcgttactgaccgaagtcgatgggttacaagttgcagtcgtcttggacgatgttttctacgtacctggagctgagtatgggcttttgtcgcctggacttgcagtagaacatggccttcagtttgattatgatcgtgagacgatgaacttccgggttatggatgaaggacgcaccgtgattgttgccacaccccaagaagctacatggggcttctttgtttcgcatccgtctactggagcaattgttggtccgcaggaccagcccctgtgtaacgtgactgctgttaaagggttgcatctttggagctctggcatgagcgcctgggccacacgtgccagcagtacctgaagactatggtcgaccgaggactcatgaagggcatgttgctgactcagcgccagcaccagggtccatgtgacgcgtgtcacgtcggaaagcagaaaaagaaggcacatcgcaagaagctggaccgaggcttggagcagcccaaccaagtggtgtacgttgatttgttgatccctagcaaggataatggaactcgctacgaggcagtgttgattatcatggatgggttttctcgtttcgtgaccatgcacttgctgacaagcaaggcgagtgaggtgatcaatgcgcgcatcaaagagtacattttatgggctgagcggcaggctgggagaagcaaacgtggtgtgaactggatcaagtacctggtccagcaggtgtggactgataagggaggcgagttcgtcaatgacgcggtgagcgcatggtatcgcgcacatgggattgagcatattcgcgtcggccccaagagctcccagctgaacctgtgcgaggggacgcatcagtcgatcgtcgagatgacgaaggcgtccatgcaccacgctggtttcccaaagagcttgtggccggaggtaatgcgcagcgctgtgtgcgtgaagaacagagtgtacaacaaggatacacaagggataccgttcgagatgatgttcggtgctaagcctgatcatcaccacattcacaagtttggtgcgctcgcgtacgtgcacgttcctgtctcgcctgggcgacgaaagcaccacggcaatgcaaagctaggatttgttctgggctatgctgaagatgtcgtggggtgcaaggtatattttccggaggagtggacggctatgttcgttgctgacctacggattgctgaggatgtagtgtattgtgtccggcacgaagtgtctgtggaggatgcagaccaggagtcactgcgtttcaaacgctctgaaaatgaacacgaactagattgcagcatgggttatcatgaggaaactatcactgagcttgggcagcggggaactactgttgcgcctctgactggatgcgagtctgcggattcgcaacccactgaactcgagggaggcgaggaagctagcgagcgatgtgctgcctatgagcagcgcccgagtggcgccttcgaggataattctgctgcgtgcaggcaggcgacgcagacagagcggagctgtgcaagccctgcaggagtcgaaggcattaccgatgctatcccgagcgaagttggagctgcgatggctgacgacatggattgcgcaggcgctgtccgcggctacggagcgcatgtctgtgcagggcaacacacggacaccgcatcatcattgccctcgcggggtactgtgcagcagcaagatgaccagagtgagtcgggcatctcgccgatgcaggcatcgctggatgacgagcaacagcgcgatggcgacatgattagtactgatggagacgaatctgtggctggcgtgtgtggaacagttgcagagtcgctgctgtcagaaaaatatgacgatgtggctgagtctaccgaagatgatgctgatgaagtggaaccagtggaggccggtactgctgatgatgacgaggttacagtggcgagtactataacatctatggaggataatggacaagtggagttggaagagttgccgattcgacatgaagttgttgatgcaggtccactattcccccagaagcagattgggaaacggactcaccgtgaggaggctccgtcagaggagttgcgagtcgagcgtggtgctgagaagcaagagcctaagcggacacgcacagggctccgtgagtaccacgaacgacgacgcctgcgctacctcgacgactacgtcgcgaacgaggcgcaaagtacagcacgtattctagacgagaatggcaagccgatccatgctagcagcgcgaagatcccaaagaacaagcgtgaaatggagcgttcaaagtaccgtgagttttggatgcaagctgatctggaggagattggtgcattgagggcgaagggtgtcatcatggagatgcctaaagaggatgtaccggagggggccaagcctctgaacactcattgggtgcgttctctgaagacagatcgacagggctatgtcatccggttcaagtcccggattgtggcgtttggcaaccaccaaagacctggagtggactttgtggagacctttgcccccgttgctcgcatgtccgcctttcggatgctggtggctcttgcagcggtgctgcatctacaattgtacggtggtgatattaacaccgcatacctcaatgcactgctcgcgatccgccagtacctaaagtcgatcgaaggctttccgtgtgagatcaatggacacgtttacgtggttctaaaagcattgtatggtttacggcaatcgggccgagattggaactcggagctgagccgctggtttctgggccatggctatcagcgctcgctgactgagccctgcctctactaccgctttgagggtgaagtggtcgtgttggtcctcgtgtatgtggatgacatcaccgtcgcaaccaactgcgaagagatcaagtgtaagctgtttgaggagctcgacaaggcctatgggttgaaggaccagggtcgactgagtgaatatctgggcatcgaggttgagcagacccccggcgccgagacactgcgccaggtcaagtacgcgcgtgatgtgctagagacgtttgggtataataacgcccatgcactatggaaaccaacgtgcgacttgggcctctgagtgacaacgaggagacggacacgagtttcgagtaccgcaaggcgataggtatgctcatgtgtctggctggctacaggtacgctcccagacttggcgtacaccgtgggccagttgagtcgcttcgtgagcaagccctccaacaagcatgtgggtgtgttaaaacgcgtgttccggtatctggctggtactgttgactatggtataacttacgatcgcacgcaagctgtgccggacagcgtgatgttggatggctactgtgacagcgactgggctaacgacccagcctcacgcaagagcacagcaggatttgtatttacgttggctggaggtgctgtatcgtggatgtcacgccgccagtcaatcgtggctctctcaacggccgaggccgagtatgtggctgcttgtgaggctgctatggaggctgttgctgcgagcaatatcctgcaggaggtgctacctcagcggaatgtgcaactgaagcttggtattgacaaccaggctgcccatgttttggcgaccaaagctacctacattcgccgcaccagacacatcgaacttcaatggcattttgtgcgtgagcaagtggagaagggcacgatctatctgcacaaagtgaaaggtgccgcgaatccggctgatgcatttacgaagccgctggacaagcagcgactgaaagacctgctgtggctcgtaggtgtgagtggtgccaagtgatgaactaacccgcctcaagaagtgcattccggaagtcgaagcttgagctttgaaggaggcgtgttggaatgcgtattgcaggctgtcttcaactgcattgaagttcaagatgaaggccttgggaccctgcgagcctggataagagcagcagcgctgtgaagtatagtgaaactaagtatgtagggtctatgtatgagaagctgctgaagcctgcttaagtagttgacgggggctgcagcactaacagtcgatttactttctctttcatctttctcccccgagtgttggctggtggccatacggatcgagtgcgacttctaacaggatttgctgcagtgcgcgatgctagggaggcattagctgacgaaacagcaggatacaccatacatcgtcgcgatgagcaagacaatcgcagtgtcaactcccaagactgggaaggagagaatcaccacaaccgaagtcagtaagaccagtgatgaaaaaaatcgggctaattgtgcataaagcaaagaaaataagtcattcgatgtattcacattttcaccaataaatacaattcgggacccgggcgagggggagggggttcgacctgtacatgttgaattacgggagctcgagctaatgaaggtaaatatacttcgaagtagttctacatgtagatgaagctcgatgagtagataacatgtattcacaaaaaaagaatcgacctgtatgatgacgcttgaccacccccactaacctttcacatttaaaccgcacagctcagtaatcagttgacggcacgcactactctgacgacaaagtttccttcctcttcgattgtacgcatgtggttttccagcttaaagctaacacgtttcacattctgagggtgtttcgcctttatggctgacacagggctcttcttgtacacattcaggtacttaaacagcagcttgacctcgggcgggtggtacctgtccacattaagttgctcccggatgcccccccatggtttgcttgtcccacttccggtacagtttaagtttaaacttgtcgttcttcatggctttcttaatggcatttctcgagaggcagaccatccaaaccgaccagtttcttcagcgcgctgccgaaacttcgctcttcatcgccagcaccgtccttgttcttgtgactccgcaagaatcggctggcgttgtcgtcttccagagcagccttgccggactgggatgactttgtctggtcaatgcctgctgataccccaccacaaagggcgagcagtacgactactaccagcagcagaacgtaacttcgatgcattcgcggctcttggactgaactcaccgcacgtgtgcttgtccgcaggaaggaaaatgagaggggtccaatcagcgtaactgtaaattggagaggtcgtcattacgaccctcttggaatgtttgaaacaaacacattttcgtggctgaagcagatcctacacgaccgattgtacccgtgtccaatctcccaatttactcgcgaatataagctccctggacgatttgacataaagtaaaaaaaactaaactgaaagtaatgaaaaacgtggttcgctatttcttggacaaaatacgatcgacctcaagaaataccgacatttacaatgtaatagatggcgtttaatggtatcatccgagagggcatctaaacattgctgggagcacgaacagagacaaactcacttagctggttaaataaaatcactgtttctcgctgcaatgtgcagttgccgcaggtcaagcacatttttggtgtgtgcactccctgcgcataacggtggaacgactgtaacgccaagaaaaatggtgtttacggtataaatatgtacgtgatttattggtcccggagagccagcatacatgtacaactatgtatttaatacattgtattatacaaggatgtttacggaatatacatgtacattttgcacggtaaactggaagtgaatctgccagtccttacggggaaaacttcaatggtccagtagtgaattcgtccgataccactagcaagccccatgaagctcttagtcgttgcattggtctgcatcacgctgctctgctctgttgtgggcgctacgattatccatgaccaagtcaagcccttcgcccaacccgttccggtcacgatatccgagaaggcagcggtcaagtacaagccacagctttttacctatgatcggtgcgaatcgtttccagccgtgaacgctgcgggtgaagtcactggcggtctcaagggaacgaaaggaaagaaaggttgcgagaaagcacctcggggctctcaggtttacggccgctctgggtggtatcaagacaaatggcccatgatgtttgcgtggtacttccagaagaacgttaaagggcacgcgtcaaagaagcgccacgactgggcgaatatggtgctgtggatcgacaatcctgctctcgaaacgtcaaagattcttggcgcgtcgttgttactgaaccaccttacgagaagatgaccgaacttcacccgatgtttttcgctggcgccgagcaacacattaatggaaccgaacctccgcaatactaccgtcgccgttatcaatcaccccgatacatttattcgtatacggcgggctccagcttcaccacgagagttacccattcgttcggatatcctgaaaagggctggatcaagttggaggttgcgtacgcagacggcaagtcacaggatctcatcatgtgggagcaacttacggatgcagctcgcgagtgtctcaattcggcggatttcgaggatacgaaggtgcctttcaacgataaaaactttcaggaatcgctgaagcaagcatatccgttttaggtcagcggtggacttgtgtctaactagccccgctccagcggaagttatgggcatttcggaactgcttcggaactgcttcgcttgaccacacctgaggtttagcaatgaaactcaataaatgacggccaatgacagttagaatactcctatccgatattacccatgaactatagcactccttctagaccgtgggaaagcgaaacttgtcactagcgcaaaatagtgatgcaacttcactaagaagtttgcgggaggatacactaactatttttactgtagcaaaatcaagcaattgcataactatgttaaattaatactcaccgctctccgtaataaatcatagttcatcgatactgagtgttactggcgccagtctaacacttaggtagctcttatggtgaaaatgtaaacaattcggattattgttcttggtttctaaggcagtatgcgtaactagtttgaatatttcccaccccgactcggttgtgcaacacggcttggagtctcagccctctcggtcgaagatgaggttgaggagatggggtcaatatgcgggaggaatcttcgcctttgctagacgatctcagcacaattccagccgccacgttcaccgttattcccgagtccctgcctgacatcgaggtcgagtatacgaattccaagcttgcactagctgccgataacaaaaatctgcttgccgaagtcccggatctattgaaaggtaaaacgctgtccttaattcttagacttagttgtattttacggtaagccttttgactaatcgatattctcaccaatacagttgtaacaggtacggtactctgtaccgggtgacgagatcagcgagaaacagcgagcgagcaggacgacgagatctgcagcacggaggggacgacaatcgagggagcgggcggtggcgaggtacgagggccacacgttcgggatcttgggcaccagtagtcgcctggacgcgaacgagaagacgcgatccaagacggagagcggtgagtggctggatgcacgtgctagagagcgcagtcagcttgagaccgctcagtgaagaacctacctcgcgggccacagacgacgagaagacgagtactggcgagcacgagcagccggtgacgatgagagacgagcgaggagtgatgaccttcgcagacgactgagcaaggggccaccttcgcgggttgtcgccgacaacgaacgactgacgagtgggtgaggcgtgtaatgggcctaccttggctcactactacggcttacacgtatgtgcacgtgtatgaggaagcgtaggtttcttttacttgagttaagtatactcgagatccacgagtatactttaaacaagataaagactccaagtagcgggttttggtaaaagatgagaactgctatttttgttttatgtttctgacttcctctaaaggtaatattctaagataggaatctgccaacggctggttggcagaattccaatgctatgcatgtcgctcattggctaaaagatgctgctctcagccaataggaatcctaagtctctatggaccacccgtcgtggtggtcgtaaatgtatgtagccattggtgtaccttacaccaaggtcgaggaagtgttcaaacctctaacagacatcgcatctgttagagtaacaagtgactgtagccacttgtgcgtgtaaccccgttacaccatccccccgtcaaggtcagacgtgccggtctcggcacgtcaaccaccgttgaccgtttggtcaatgcgtgacgtttgaagagtgcgtgctcgttccgtaacgagcacgtcgaagttgaagacccctggcgcagcagcggagaacctctctgctgctgatagaggacgatggcttccgccgagtcttctgcttcggttcagtcgagctaggtagctcgtgctgcaggtatagcttcagcattccgatgtagaacgtcggatggagacgcatactagacggtacgtccattgacaagactaatgaacccttctcgaattcattagtgttgcccctgccaacattgtctgcgttcagcttctgtcggtcgacagaagctgcaatagcgtcttggacaaaccgaatgacggcttgtctgcgctgcacgaagttgattgcgttcgagctgaacgagttcagctcgtttccagcagaaggcccggcctctgcgttggtcttcgtggtgtctgtgccctgcacagacacgctcttcttcttcttcttcttgtcagtgtctgtgccccgcacagacacgttcatcgtgcgcttgtcggcgtctgtaccctgcacagacgcgcggttcttggctttacttcgtgtcgttgcggctgacactgtgcaagtgtcagcggcattctgcggctgctgcgttgcagtcgtagatcctcccccacttaaggaaggagccaccatccggagtagactcgggaggcgtgggtgccattcacgtagaacggtgtatgcccggtcgaggcatgtaccgagttgttgatggcgaactccgccatcggcaggcactcgctccagtgttggaacgagtgcgcgtagctcttaagcacgtctacgagcacgcggttcacgcgctcggtctgcccgtctgtctgcggatgatccgcagtcgacgtcgaaagttgactcccaagaagtgtaaacacttcttgccaaaggtgtgcagtgaagcgcgggtctcgatccgacacaatgtcgatcggcataccatggtgtttgaacaccatgtcaacgaacagacgcgccgtctgcttcgcagtcacttcagtgggtaccgcagcaagatggtacatcttgctgaagcggtcaacaaagaccacaacgcccgtgttcccctggttgtccgggggaagaccgaacacgaagtccaaagacatggactgccaacactcccgtggagtcggtagtgactgcaagggagcctgcgcgaagggcgcaggcttcacacgttgacaaacctcgcaaccacggacgtacttgcgcacccatttatactggagggtccagtagaagtctcgcgtgagaagaaggtatgtcttctcacggcccggatgccccgcagtcggtgcatcgtgatactcgtacatgatcctgcgcaggtcatggtcattgggcacgacaacgcggtccgcgttgtcgtcgactgcactgtagagtagtaacccgtcgtgcacccgataacggtgtgcacgagcacgaagatgcttcggcagcttctgacgagctttgtcagaaggcgctgagccgtagaccagcaagagcttcacgtccgcgtcgtgcgcgtacgcgaccttcacgtcgtccaacagtgacgacgttggggtgctcgatcgcatggcgtcaatggcattgacgtcggcatcggtcgtggcgtagtcaggtcgaagcgagagcgcgtcggccgccacattgagtcttccgggtttgtactcaacccggaatttatactctgcgaagaatgagagccatctcgccatccgttgcgagatgtgcagcgatttcatagccgtccgcagcgacgcgtggtccgtatagaccacgaacggtttgcttccgagtagatatactcggaacttcgcgagtgcgtacttcatggcaaggagctccttgtcatctaccgggtagttgctctcagctggcttcagctgacgcgattggtagtagacgacacgatcacggccctcgtgatcgtgctgcatcaacgcgcatccgattgggaagtcggatgcgtcacacacaacgtggaatgggcgatcttggtcagccaccgccaagatcggcgcctcagtcaagccccgcttgattgcatcgaaggcctgctgacactcagcagtccaaacccactcggcggccttctccaggagcggtgacagcgggcgtatcatgcccgcgtagtccttcactacacaacacacaagtacgtggccaagccaaggaactgccgcagttccttgacgttcgacggcgtcggccactcattgatcactctgaccttctcagagtcagggcggacaccgttcttcccaacgagacacccgagcacgggtatctcgctcgccccgaagatgtacttcttcaggttcgcatagagcttgtgtttgcgcatgagcgcatgcagcttccagcgatgcaccttgtgcatctcaacatcgctcatcccgtccgcagcccggctgtggacgaacacatcatcgaagtagctcagtgcgaagtcgcgtaccgagcgcaacaagtgcgtcacgcacctgttgaacgtctcaggggcgttcttcagaccctgcggcatcactagccactcccagagcatgccgctcggcgtgctcacagccgtgagagggatatcgctctcacgcatgaagatctggtagaacccatcgcgcagatcaagagcaatgtagatagtgctcctagccatcgaatcgatgatgacatctttgcgcggtatcggtgtctgcgccggtatcgtcgcatcgttcagcttgttgtacgcatgaaccatgcgccagccgccctgtggcttcttgacacagaacgtcgtagcgctgtgcggggacttcgattcccgcacttgtccagctttgcgacgactttcgaagaagtcgtcgatcgccttgacctgctctcgcggcagtggccactgccgcgtgatacagtacttcgtccccggcacgagatcagtctcgtgctggatgtccttatcctgcggaagctccgctggaatctcttccggaagtacgtccgcgtactcccgtaagatctcgtagtagggactcgttttcaacgagtcccagctctgctcttcaaagcgctccttcttcgtcttcgcactgagagtgtccgagctctcagtggtggtctccatgaagaactgcctcagttcttcattctcgctcctcgttctctcggcgtccgagagaatgcatatttgctcgatgcgtccatcgtgcaagtcacgcgcgaagcgcttccagctcatgactggaagggaagtcaactccgacatgtgcgtcggagggttagcgagagtcatctccctgtaccggaacccggcacaggtacgcgtcaagacgttcaacgtctcgacgtccggcttctcagcctccgtctgcccggcagacattccttgtaacatctcggccccaggccgagacttgcgcagcgaccttcgcatgcgccgtcttcttgttttgcggagcccggctccgcttagttcttgacctcgtccaggcccagccgtggacgggtgttcttcttgtataccgccggcgggtacatcccgcgggcgagcgacttcaagcccggcttggtcgtccggcgcttcgtcgtgcagcccggctgcacgacagcatgcaagtttttccggtgcgggacgtttgcaaccgtccgcaccgcctgcagcgtcggctcccggagccgacacgccatcatcacctcgacgcctgttattggcggagcccttcgttacaaagggtgcgtcgactcccggagtcgacgcgaaacttcttttcgcagcgccggttcccggaaccgtcgcgactttagtacctcgacgccaaccattggcggagacccccattacggagggtgtgtcggctccccgagccgacgaatcaaattcacccaatccatcgactcccggagtcgacggcgtttcgtcactttggctcttattattggccaagactgatccaatcagattcgcgtcagcctccacggctgaggcgtgtgactcacctgcgtcatccgtgtcggagacccttcctgattcactgaaaagcgggtgtcgatctccgagatcaacacattttctccttcagccgtcggcggcgacgccgacgcttgctgctcttgcgcgcgtgctcgcgcgcgcccagggcgatccgggacagcggcattagacgctgtctcgagtggggagtcgagcgcacctgtcggtgcgtgcgtagcggcaacagggccatcgctcactgttccgctgtcgcgaccgaagcgcacgagagtgcgcttctcccaatcgatgaccggatcatgccgtgcaagccacggcatgcccaatacaatgtcaaacttatcgtccagatccaggacgataaaggtctcgacaaactcttgatcttcatacgtgaagcgcacgcgtaccttgcgcttctcggtcttcacgacggcacccgttgccagtcgtacctccagtatacttcgaggtatctttaaatcctcgaagtcaagccttgatagacttcgcagtcgaacaaagttgttcgacgcgcccgaatcaactaaagcacgaagagagttgctccctctcttcgaagacacgttcaagatgacaaggttcggtttgtcatcatgcatttttgcagtgagaagggtcctcactgggggctgcagtcctcagtgtcgaatgtccgagttggacatgcgtgactgctttaccagtagggcgccccgcgcctactgggttccagcgttttttgtttgtccgcgacgatgcccggcatcgccgcgtcgaccaccatctcggtgcacgggtgccgtgcactctcgggcatagtggccgatccttccgcaacggaagcatcgtgcattacttccttgttgctattgataaccaacagccgttgcattcgagaggtccattggttctggacctcccgccatcacgaccggaggcggttgcagcctcggcgcattcgcatgcagcttagcctgcctcagactaaactcctcctgcattgcaagagtaatcgcagcttcgagagtacctgggtactcacggaagagataggtctttacaggcccatctctcagacccttcatgaacgtgacgaccttggtcgcctcgtctattgggttggtcacaatgttcgagaccaagtgccgtgctctctgcgcgtaatcatggacatcgtgcttgtgcttaccctgctgtaggtcgaggaactctgccctcgaccgaaactcattttgcgggggctcaaacgcttgcctgagctcctccttgaaaccctcgtacgtgctgaagcacgtaggataagagagtcggcgtccatacgcccaacttctcgctcgtccgccaaggcatgccatggcgaacgcaaccttggacaacgggtcgacgatacgtcgagccgcaatggcagtgtcgagttcgacaagccaccggaggagaggagaggctcgccctctcttccgacatagttgctcacgtttagcttcaacgattgctcgcgcggtgtcatccccgacgccaccgtgatagaggaagcagaatcccagagcaacaccgtgttgctccgtcggcgaaagtgtgcgcagcattgcagctacagccgcttctccaatgactgctgacagtctttggagtgcctcccactctgggtccgacaggtggaggcagtcagggcgtgcaacatgagttgcaggcgaagtggagctttccatgagcacttccgcgctcatgaaaaggttctcagctcctcgttcgtacagctccgtacgaacgttcaggtagtcggtcgttggacggactacaaagttctaccaggtgtaatgggcctaccttggctcactactacggcttacacggatgtgcacgtgtatgaggaagcgtaggtttcttttacttgagttaagtatactcgagatccacgagtatactttaaacaagataaagactccaagtagcgggttttggtaaaagatgagaactgctatttttgttttatgtttctgacttcctctaaaggtaatattctaagataggaatctgccaacggctggttggcagaattccaatgctatgcatgtagctcattggctaaaagatgctgctctcagccaataggaatcctaagtctctcccgtcgtggtggtcgtaaatgtatgtagccattggtgtaccttacaccaaggtcgaggaagtgttcaaacctctaacagacatcgcatctgttagagtaacaagtgactgtagccacttgtgcgtgtaaccccgttacaaggcgggcgagatgctgtcaacagcccagctgacgaagcgacgagtgaagtgcggctagtgacgacgctatggcggagccaccaacagaccagaacgtgcatgagtgcggggtgaggcgggtgaagacctgcgtgtcagcgccagccaacagactgataatacatgagtgtgcggggtgaggctagctacggctggcgtcggatctaggcaaggtgaacgagtcgaacgtgttgtacgagttgtacgagttgtacgagttgtacgagtactaactgacgaacgagtagtaatacaaaaagtaggaacggacgcgttccgtcacaggactcaagtggagatcctgtcggtcaacatgcgttgaagttgcagtatcgagatccttaccacaacggaccttggcaaggacgcagcaaaagcactacgtgcgacgacccgctggcgagctggcgttagcagacccgttacacagtacacgaacatgtgcagtttttaactctgaaagtgcgactttaatcaaatcgagtttgtgacagtcgaacgataataaaaaaatcaatttgtcgctttgacatgacgtgtgatggcaatgcgtcaacgaattcagattgatttagaacataagcgaagacttagagctttgcttagacaaaaatgaagtacagtataacactattgccgcttgcaaatactttgccctctaaaatagacctctaaaatagaccacgcctgtctcttaatatgagtggacacgagataggcgagggctgatttagctttatgctttgctgggggccgcttttaggcccagaaactcggtttggcccgtctagattggcatttctgcgtttccaagtcgtagaaaagcgccttggtcgagaaaacagagcccaagctcggatcttagaccgtactggcgagatatataaatcagacctaggtcttaattaagagctggctggattaaaatcgagattattaacgagataataagcatgcgttggccaaaatatctgcaaacggcaataccatgcgcatatctattgatttgttagctgcgattacgcccgaaagatgtacgaatacaacaaaatctacatttctccctacttttttgtagcactgaataatcaaactcagtccgaaaccagctcccttcccatcgagcccaaagccgtcagtaattttgatgcagattcttcactttctacttctcgtgctgttcgccgtcgttgcaacatcagacggcatcgcggccactgaaaacaaggtcgacacccagcagaccaacatccgtagcgtgcttgcgacggaaaagggcacgaacattaagtctgtggagggcgacaagtccatcaactccaagagcgaggacaggggaattaacttctcctcgatcctatcgaagctgaaggtcaaggctcttcccagtaacgccaaaaccgccggcctcggcaacaagctcaacagcttgcgcaaagatccggatgttgtgcgactcctttccggccgtgaatgctgcgggcgaaacctctggcggactcgaggggacggacggaaaagatggctgcgagaaagcacctctggggacgcaggtgtacgatcgggatggtttcaagacaaatgggtacttcctgaagaactttaaagggcacgcgtcaaagaagcgccacgactgggcgaatatggtgctgtggatcgacaatcctgctctcgaaacgtcaaagattcttggcgcgtcgttgttactgaaccaccttacgagaagatgaccgaacttcacccgatgtttttcgctggcgccgagcaacacattaatggaaccgaacctccgcaatactaccgtcgccgttatcaatcaccccgatacatttattcgtatacggcgggctccagcttcaccacgagagttacccattcgttcggatatcctgaaaagggctggatcaagttggaggttgcgtacgcagacggcaagtcacaggatctcatcatgtgggagcaacttacggatgcagctcgcgagtgtctcaattcggcggattttgaggatacgaaggtgcctttcaacgataaaaactttcaggaatcgctgaagcaagcgtatccgttttagatcggcgattgtattgtgttcttcccgcggagaactcggaaacacgaacagttataccaaatatccctgggtttaaaaagaaaaaaatatctgtattttgacattgttcggagttgaatgttttaaaaaaaacttttactacttcacctctaggcaattggcgtcgccatcgccagcttgtcgttctccgagctcgcagtgtgccaagtgcatgatagcgcgtgtgtgagcgtgccctctttcgggtccacatgccaacgaagcagcagcacgttgaaggtgcgcagcatccggcttgggaccaactgtgccactatcagcagcatcaccgacgccgcctggtagatgtgctccccatggtagatatcccgtgagcagcaggacctcagtcgtaatgcatttcttaccattgtacgagacgtacgcgatatcttcgcagtcgtggaataatttagtgaatggagcgccaatacagttcttctcgaacgacgtgagctcctcgggcgtggccgagttgacttcatacttcctcttcttcgtggtactcactccagccgctgagaccttgctatctgcactcttcgagccaaaagtaccgttcacagaatttaccttcggagtaaacagtttggcgatgagcgagggatgacagtggcaacgcccagagttaaggacaggatcaccaccaccgacggcatgttatacgcgaagagaatgcaagagtcgtttaacccgcagtacttggcaccacgagctgaagtcttgcgtagaatctctgcgttatccgtgagaatagccacgaacggcgtgcgctgtacggacagcagaatcgagccgacacaaatcgtgacaggcaactgcagggcctcccagatgagtcggtagtgtctgtcgagctgctggtcacccgagcgagccttgaccatgttcacgaacgagtacgagaaggcgaagaagcagcacgtgaggttggcgatggattcaccggtgagagtaccagtcgcgagcccaagcatgtacaggtccgagttgtagtagaagtggtaggtgatctgagccaggtagacgatctgcatgcggccgttctggcatcgataagcccagatctgggtgagcagcaccgatcgtctgtgtggcatcacctggtacagactcacgacgcccatgaggaggatctgcgtgaccacaataccagggaggaggttgatcccgacggtgtcaccgtatcgactgcggaaggtgttgaggtagagcgcgactcggttggggttttgagggtccacctccaccagtccttcccattgcgtgttgaagtagttgtggatgcagacgtctttagtgctgcagagaggaatgtcgtcgggagactgcaccatcaacccatacgtcgcccagtgcttggagatctcgcacgtgtcttcgatgtagacgcccgacgtgttgacttctcgaacgcggcagcctccgtagtacgcttgcagttcaggctccacaacagtcgcggccccatacttcgtgttagtggctggaacaatgcgcgagacttcgctcatgctgctggtgaagccgtagggaaacagcgtcaacacatcggggacttgtgcgagcagatcctcgccatcggtggctagtgcgagcttggaattcgtatactcgacctcgacgtctggccggcactcggtgaattcagggaagacgctgaatgtggcggcggggatcttgccgaactcgccgttgccagcgccagtcgggtacaagtagagccgcgcagtcccgaatatcgtccaggtcgccttgcactcgtcctctcgctcgacagccagctccagctcacgctgcgtctgcagagacacgccgatgttgagtgtcgagacgatgttcagtatctgctgcggcgtgctcgtggccatgaccgtggtagacccccactcgttgatgccgctgtggcaaatggtaccgtcaccatccaattcctctccgagagctagaacatcactgttcaaagagctgaagtcgtagagcgattccgttgggggttggctgacgagggctgcgaatgtcggggcactgacgaacgccttatcactgaacaaactgagcttgagcagagtgattttgcatgctccaaggcaccctgtgcaccctccagccatcgataaatccatctcggtgaacgagaagaagctgtcgttaggcttgatgagaacggtggcgtctgagaggtacccggtggcaaggaagagaaggaacagggcgagcgggccgatgataactcgtcctatgacagccagacacgcggcgatgacggacggtcggagccagttggtacacgcttgggtcttgagattgagtagttgctgatgatagaactccagtccccagtcggtcggagggcggctggccatggcgttctttgtcaggctgcgttggctggtgagctggagtgagtgagtcagatcgagttcgtgaatgggactgctctaaaatggcgtgtagctgctactgaaatagtttgcctacaatcacaaagagccgaactgcgaactgcagtgtgcttagctcttgtgaacgctcgttcaatcttagcacaagtgccccgtagtctattccattgaaggctcttctcgaccttatcatcgatactcaacgttgaatttaattttggccatcaacggcgagtcaacaaacgtcacggttatcacctgatcggcgcaactagaggcgaagctttggtctgggaggacagtgtagacttcctttgtgtgcaaacgtggggtaggcaataataatgtaacatgaaaattggtggcaagttttcaaaccctggtgtcgcgccttcctggcaaaaaatggcgaagttgccgtgcaaaagacacgaaagaagttaaaggcgcgctcggccgggggctttgggctttgcccccggccgagcgcgttgacgtcatgcatttcagctatacaaatttacacaagaaggattcatggggtttagtcaatttagagcggggccaaacgcggaaaaagagcaatccgttagttgttatttcaatgattttgagtaaatgttagcttataaggagaaaatgcagctatcctagttatgattttccaaatgaatgaatgaatgaatgatgtacgtgttcgcgtagccataccgtcaaaattccaactgtccgaccaaggtgtccaacctgtaccggtactacagcaaatcattttaatgacatctatttcattttaatgacattataactaaatcctgttcattcattcgttcacttcggagcgcgtggagagggcccccggccagcagcaccgagagcaagacaggcgtcggcagcgagatggacaagtgctcggcatcgggcggggtgatggagctcgaggccagcagcatcagtagcagggcgacgacgcgggcgagggcgagggcgacaacgtgggcaagcgctcgacctcgggcggggtgatggcgctcgaggtcagcagcaccaggagcagagcggcgactgcgacagcggcttggcctcgcgcggggtgatggccggcggggccagcatcagcagcaacaacaggaccagtgagtgcggctgcagcgacactgccggctggctggtcttgcgcagggtgatggcggccgaggactgcaagacactctatgccctgccataactgtgaacgtcctattctaacgttatgttttgtgcagtgttgtttataatgtagtaatgaacaagtgcaagaaaatacacgaagaggtttacccaaattatgatgttgttcatgtattcatgtgatgtcggtggtattgtcccttgatcagcgagcctggtgtgcggtgggtcgctttaactgttgagtttgttaattttgctatgtgttacagtagcagatcaaccttgcgcgggcgtcagtcgaatgaatgatggaagtgctgaaggttgcctcggatcgacaatgacaccttggtcaacgcgttcatggaactgggcgatgagcgcgtcgagcttaccaagcttctgcatctgacgaagagccttcaacgccgaacctgctgcaaccgcggaggagccgtgcgatttcaagagggtgagtgcgttctgctgcgctttatcacctagctccaggacctcgcttttgtatgcaggcgaggaagtgtcaagcgcgaaaccttcaggtaagaaaagcatgagataccctgcgatgtgcctgtactcgtacaatgctgtcttctttacagaacgcgacacatacacacgaggctccgctgtaaaccactcgaaccagattgccgacaacgactgggctcccttcttcttcgggcgtgtcgtcgtagctcctattggcggtggttgttcgggagcaggaagcgtggcgtcggtgtttgctgattgagttgcggctgtgttggtaagggcttgaaggtgcgcttcaacagctaatatgcgctcgtcgagtcgtttgttctgcaggattaagacgtcaatctgctcggactggcgtttgatgaggcaatcaacgcaggcgactgctcctcaccagcgctagccgaagcctctgatgcaggaggtgccacgaatgcctggttaatcgtcacgctccacgccagcagctcggactcaccgatggctcgttgtgctaggagctcacgtatcttcgtgatgagcgggctgcttgggcagagcactaacatgccggggtaatgcatgaacagggtagccgtaaggacgtcagcgacgtcgtcgtcgaggttcaaggtagcgtcatcgaaagccattgtactggaaaagagaagctgctgcatcttgcgagcgcggaccaagactggcgtgtccagagcggctagcgttggtagccgcgcgccgtccttgggcttccagctacttaggacgcgggacaccttttggtcggcttgggttgtaccaagcatgtacccgaaggccttattgacgcggtccagctgccagcccccgcgctcgataatccagttttccgccaaggtaccgtcgttggcatgcatggccccaccacgtcgaaacgaatgagaggtaagatctggcgtcatacgaatgcttcgcaaatcggcgagttttttaactctaaccagcaacctgttgacgtatgcttgtgcaccaggaactgcccgctttgtcgaaggtgcttcagattcctccatagaaggctggtcatcatcaacttccagtagttcaatcagtgtaagctcctgtacatcatcaatatcatctgatctgtgctttttggcgatgaactgagggaacatgcgctggcttggtgccttctgcataaccagcgccacagccaaagcttgcagaggacatgtcaagaaattcgttgggtccttgaataaggagatgccttgtagtaaagctgttttaacccgcttaaatcgaagaaataagacgccacctagcataaatgccctcagtgttaaaataattctgctaagaacatcgtaattaatcacttaccaggcaagatggatagctggctcttctcgactgtttccgcgtccgagcttcgaccgtaaaggtaccacatcatcacgactagggccgcgtcgaggtattcactctccgtcgcagccgttgagtacagtagagacaccatagcttctaagtcttgtttagagcacaggggtgctttcttctcgtcgccgacctcctctcggttgctacaatacatacccagcccagatagaattttttggagctgagatttaactaaagctccttgcagtcggtacttatctactagccaattcttgacgttgtcatagtatgctagacacgtattggtcgctcttactttttcggctgatgtggctaacgaatatgcatacttgtctagtataatacgcaataccttacctgtcatatccccgtcgatgagctggtgggtggcttcgagtgtcatgctctccgcggccaggaacgtcgtgaacgagttgatcgccgtcgccctggtcttcttgctgttggcaggagcaagcgatgcgatcgacatgctagcctgcctgctcttttcactctgaacaaaaaaatatgtaccgaccattcgggttggaaactgaaggatatttttgggatatgcatttctatagacatttgtatggcattaaaaatattctgacaaaattccaaccaaatatggttggaacggttggaaaaatgccctagtttagaggggcttccgattggccaaaattcatcgaacttaaggcattcattgggtgaaagtcgtcgagtacgagcggtttgggattacaaaaaagagtagcggttggaacagagtgaatattactccataccatgacggtgcagacagcggccgacagtggcctacagcgtcgtgattggtagaaataagcatttagttgagcggttaatctattggtcatatcatttgactcaaatgtcaattccaagatgcaggccaggccgcacggacggcgggtgggtcatcaaggagggcggcgagccgaaggacgtcggcgaaaaagggggggggggctgcatagttgcgcctgccaagatgtgggtggtgtctgggaggacggcggtaggctgcacgacggcgggcgagtggtccacggtggaggctaggaagatggcgcgcagcacgacgatgacggttacctgaagcagggcggtgggcaccaggatggcggcgcaggacaagacggccgcgtcgtggaggatagacggcgggaaggaggaggaggagaaccggagcgaacggcaagaggcggcggaccggaggtggggcgatggggagggtagccgccaaggcgagggcggtaaaggcatcgagcggagggaaacgagcgcaagggcgcagcgacctgctgggaggcgacgagcatagggatgcgtgcagcaggaggacgacgtggctgctgtggcttgctgcggcttgcgtactggtgttggcaccaacaacacgacgctggtggggtgctgctgctgctgtgtggactggaactgttggtggggtatcgctgcaggtggaatgctccgcagtcacacaccaccactagcgtctagtactcttcgagtaggaattagttattgatattaaatggaatgaattaatggttttcttgtatattctgcattggatcctagcacttcgctcgtgcggaatgcagcaagctccgcctgagcgacactcctgaatgagcagctctcactgagtgctgcttgttcatgttatgggtaggtcgataggcgtgcccaggaaactcgtttgagttcgtgataatggttgaaacgctattgcaaacggctcaaatcagctcgtcaaaggcgatacaaaagctaagtaacttgtcggcagcagaacagatatgtatattatatccttattacttagatttcctatgggatgaatacatatttcggccgcgttgccggtattatacgtcggcatagtgtcggcagcaaatatacctacccctaatcatgttgattggcctaaatagggatctaccggatgcttattcgctgaaaaatcgtattggacatctgattgggccatggccgccatacagtggccaagtcaagttcttgtatgtcggcaccgtcacgatattcatccatattacacctgcgctaggctcaacttagctagtcggcggcatagtgtggtgtccgcatacgtcgagtctccagtagccgacagcgagtcagcaattccagccatcagaatcttccatttcagtctgtcaccagcaagtgtgcggagtccctcgagatcttgcgcgttccgaagtcgatagccttggccactggctacgaggtcagcatcaagtacgacatgattttccaaatacatttcataaattcaagaactgctcactacattgtgtggtacacactacggatacggtcgacattctgggaacaaccagccacgaaatgtacaactttgtgatgttacggtagccataatctgtggactatgtcctcccagtattaaatttagcatagccctgttattataatagtttttcatgatggcgtgcgtctctatcttggcgtcgagcgtgctgctttaagcagcacaccaaagcagcctgctttggaagtccacccagcagcttgtgctgaagaaatatatggtggtaggtctacggggcattgcatctcggctacgggtcgatgaaaattccagactatttgctcggattccaaagagtgcgccataattacgggagtaaaattccggatgtaaatcgccccgactgtagtggcgcaacgtggaaccgagtatgactgcatactgtggaccccgactttcaagacaagaattcggcatgtgggctcgaatacgtgtcatgaagcgtactgtacgtggcaccttgagtcgggtactgaactgcaggttttaacattttagctgtagtcatcccaacttgatcatgtttgtacgtgcacaagcacccctcatgagccaatatcgcgctgggaatgtttttgcagcaaagctggcacaacggatttgtcgcggtagctttgatgaagatttaacgatgtcatacaatgatttcccagccacagtcatctaccgtagcaattctaggcgagtgtggtacccggcatcaatgataagcatctatcaagcgcgccgaagtattacaacagatactactcaccgtaaattaggcatccacggagcatgaagaagccatcatgtaggaaataagtgaaattaacctgtgtatgagcctatctgaggtggtctcaggctacaggggtcgctccagccagctgatgatcctccttgctcgcagtataccaggtgcacgacagtgcatgagacagcgtaccatctttcgggtcaaggtgccagcgcagcagcagcaagttaaacgtgcgaaggacccttctcggaattaaccgtgcaagcagtagtagcatcactgcggacgcctgatagatgtgctcaccatggaagaggtaccctgtgagaagtagcgcctcgacagtcgtgcatttttttcccttgtacatgacgtaagccatgtcgtcacagtctcggaagagtttcttgaacggtgcaccgatgcagttcctctcgaatgaagtgaggttatcttccactgaagaagtatccagatacgcctctttcttcgcaccaaaagcgcttttaggctcaatttttggagctcgcgcgagttcctgagccgtaccgatcccgttcgtggccaaagccagcgacagtcgagcagaccgcacagcactcttgacttttggactcaacaatttcactatgaaggacgcgagtagagctgccacgcccaatatcacagacaggatcgtcacgacggacggcgtgttgtgcgtgaaaaggatgcaggaatcgttcaagccacagtacttggcgccacgggtggatgttttccgcaaaatctcagcgttcttggacaggatcgactcaaacggggacttctgccacgagaggagaaaagatccgactgcaactgtgatcacgatctgcatggcctcccatacgagacggaagtggcggtccagctgctggtctcccgatcgcgccttgaccaagtcgatgaaagagtacgagaaggcgaagaagcagcacgtgaggttggcaattgattccccggtcagggttccagtggccagcccaagcatgtacaggtccgagttgtagatgaggtggtacgaaatttgtgcgaggtagaccacctgcatgcgcccgttctggcatcgataagcccaaatctgggtgaggagcacggatcgcttgtgtgacatcacctggtagagactgataacccccatgagaaggatctgggcgacgacaatttcgggtagtacgcttatcccgacagtgtcagcatagcgactacggaacgtgttgaggttcataccaatgcgatcagggcgatctgctgtcatgtagttgacccattcccacagcgagttgaaatagttgtggatgcagacgtcacccgttggacgtcgtctggagaatgcaccacaatccgtaattttcccagtgttttgagacctcacacgtgtcctcaatatacacccccgttgtgttcaccgctcgcacccgacacgccccgtggtaggctcgaagtaaaggctccaggacggtagttgcgccgtagtgagtgcttgtggcagacaccacccgcgatacggcaggcaaactgctggtaaagctgtacgggaacaaagtcaaaatttcaggaaccttgaccaacaagtcctctccttttgtagcgagcgccaacttggagacaacaaggctgtcgtcgttcgccacaacggggcggcactccgtgtagtcagggaacacgttcaagtcgacggctggaatcttggcgaagtttgtgtcgcctacagtggtcggatactggaaaagccgagtgatggcgatcatgttccacttggtgacgcattgatcagcttgttcgatgcccagctccagctcgcgtaccatttaaggggcgacgctgaggttgaacgtcttaatcacgttcatgacttattgagctgtccccgtgacgacgttcgtggttgacccccactcgtttatcccactctgacaaatcgccccgctggcatcaagagctgctccaagagcaatgtcttcgtcactgagaacactgaagtcgtacagcgattcagtcggcccaagtgaaccaaaagctttgaagtccggagagctgatgaacgcgctcccgttgtacagcgagtactttaacagtacgatcttgcatggacccagacagcccgtgcacccgccagccatcgacagatcgttctgagtgaaggcgaaaatgctgtcttccgccttgatgaggaccgtggcgtccgatagataatttgtaccgacaaacagccgaagtagagcgaggggtccgatgaggatgcgtcctgcgacggcaatcgtagctccgatgaccgacggcttgagcagagtcttccatccttgagcctcgcgcgctagacgttgctggttgtggtattcccgtccccagtccgcagtgctgtcgctatccgagccagccgttttaccgagtcggggtgacttggactggcgaaacccgaagtgaggcatgacatcaggcagacgctctgtgttggcagctaagaccgtccacccgaattgctattctcggtctccaaagcacggcgtcatcgtgtccgataaggacgtcgccaaaaaaaaatgacggccgcaagttacctgcgccagaaaacttttgtagggttacttactttacagatcaacacgaatatagcagcaacttttgagccacctacctacgcgaggtgcaatggggttctcactacatgctattagatgtatctgcatgtaaagattgggtcatagtctacgactaccaatctacgactccagtttgttttgttttggccgtccgggctgcatatacagccatttactaataaataattcgaggataccgtgcgccgaaagcgtgaaggacagcacgcagccaaacaaacacttgcgccgcctggattccgagaaggcacatttttaggcgaaattgtgagcctctgcaaaatgtagccaaactgtagaagttgcctcttctctgactcgagcttcaacatgcttgacaaccatcagtttgcctgctcaactgcatggacgatctcaacagcaacacctctctgctttcctgctacaggtattatacatgtagtatgtaaatttcgcctacatgtacacgcgcgaacagttatcgccgagatcaggccgccgcgaagcggtgcgccagagagcaggcctcggaaatggaccttcagattccgggttcgatttttccagcaaaaatgatctcgagcaccgagcagctccacaacttcaggaagcattcataataacagcaccaacacaccacttgtgtccaatgccctcctacaacgtacttctacaaggtagaggaaggcgcggcgatctactaagctcatgcgatgccgcagccgcttttcagccaaccagtgggcgtctgatttgcgtttcagccaatcacagccacagaagaataagcttaaaacgccaaagaaaaagcaacgccagcagtcccaaatctccatccgaccctcccgagccctgtgaccacatacacatgtcggagcacgcgcgcgagtacgacccgctgttcccgcgcagctacgcggcgtcctccacgacgtccacgtccacggcgccgcgctgctacggcggcttcgagcagcagaagcgcgtgtgggcgtccacggcgcggcggtcgcagcgcatccgcgtgatcgccgggctgcagctgctgctggggctgctggcgtcgggcaactacctgtggctgtccaacatcttcatgttcgtcgtgggggtcgtcgggctgctggccgtgcgctccgagcgcatgagctggaccgtcgtggtgcgttgcttggcaattgatacatttgggtgaagaaagatattctgatttgcttcttcttcttcttgatgctttgcattgcagtatttgctgctgagcgccatggagttcgcgcgtattgtgatgctgacgccgcacctgtacgagcggttcgaggtgccagggtacgcgttcacgcgctacgagtacttccaggtggccgtgctcgtgctggaagaggtgctgctagtggtgagagagagctgctgatttatgcggttttagcttcaattctgatgggttttgtgtgtttcattgctgccagccagcagcgttcttcgtgtgcatcgccgctgcagcggccgttgccaatccgctgtggtaaaactgggagcagggatgcagctgccattatgaaggcattgatacattatcaggggagtgcgaggatcatcgacacgacgatgctatgagcgaggcggagctgctgggtctgggatgtggagggaggtcccttcataaccgacttcaagtcagggcgcagtctctccctcatcgagtccggatttattaggcatagtttcatcaggcacggcagacggagggagacgacgctgctactctgcatgtagaggccgactgactgggtggcgctgcatccagcggcttcagtacgcgttatatcgtcgtgtgtttctcgcacagctaacttaatctatatcgcttcacgacaagctctctttgagcgagctgggttctatgatctcgtatctagatgagctcgatctggccactctcgacttggctcttgatgctgcggtagcgcagcacgtagcgatctgcggggtgcatctgcacgaagtcgccgcccttttcgtcgacctgcacggcttcagccccctccttgccctcgcagaacacgaagctgtccagattgggctcggtcactgcaacgcaccaccaaaagtcaggatcagactcgcactactggccccagcgccattacacattgtaaaatgcatggcgtggacgcttgtcttacccatgccttcagccgtgaggctgcgatagtcgtcggcgaacttgttcagcgccagctcattcacgtgcgactcgaagagcatcacgaacctgcacgacaataaaacaaatgcacaataaaatattagagcaggaggaggttcctccaatgcagagaataccgagcaatcttactgctgggcaaagttgcgctctttcagcgacagtcgctgggtcagcgctgcgtcgctcaagatgtggacggcaaacttctcaatctgctcgggcaacacaaacacaacaacagcaacaataagtatgcctgtcatggggcaaagtatatagatgtgggggcctaccgcaccttgcgcagacgcgtgcggaggtaggacgagaccgtgtagcgcaggcggtcgatctccatctggtagagcttgttgacgaaggacttctcctctgtgagctgcgcgcggtcctcgtagaccgagtccacgtactcctgctggttgcggatctgctccagcatctcggtcaccatctcctcgttgtacggcaggatctcgggcgcgttctggtccatggcagtagagtgcaagcggttagcggcgtgtaactcggtcaattctgcagcattttcgacgcaacgtgcagcgaattaagcaggagatagagacgcaccagctcgttcacccagagcgtgcgcatattcacgacatcctcgttcaggttctcccgatcgaactcgggctgcgactgcgactccatggcggctggctgaagagctccaaaaatgccgttcccgccaaaaccaagcttctctcttattggttggaaataaatttaccacaaatagcacccttatttgtggtgggatccttgtgtaatcagatgtagccatcttcctagaaagggaaaggtagtcaagagctcctcgtgcactggggctggagcgaagcgctagtgctgctctttctcggacgatggcggtctccaaagaactggactcccttcagtggtaaattcgagccgacaaggagaagaccgagcgaccaagacctcatgggcaactccaattgctgcgcgcagacgacgcccgacggtaagcgagctggctgagcagcgttccggtgctgcactgggtagatgctgacgatggggtggcggtgctgccattgttgttcgttgtagtggacacgtggaaaacaggcgagcggtaccggacgctgagcagggaggaggcgagggcgctgatgcccatgtacgactacgagccgtcgctgtcgctggaccacgaaggacgcacctccagcatcgacgacgcgttgtccagcctcggcttctccccggacacgccgctctcggtgtccagcagccacggctttggagagaacgcgatggtgctcgtctctgctgaaggcgttgtgcaggtccaggacgaccgcgaggaagagaaggcaccacctcctgcctacgatgaagcgtatgagctgccccccgaggcacgagcgctgctacccgcccccaactcctgcccgagatcaggtacgtgtgcatcgcgccgtgtatgcaaatgtgcagcgccccttaaccgtgctctttgtttgtcttgcttcgacaggcatcaacctccgtgcgcagtcgccgacctacagcgaccagtcgacgccgcgccacgcccagaccttcgatgcaggtagaattgctattggcctgtgtactttcttgggtggagctgattgtttgtgcttgcttctttgggtttggccagatcctccgcagccctgcatcgaagactacctgtgcacgtgcaagtcgtgcccgcgcgccatgatgatccagcgcgcgttcaagctctacagcttcgcgctggaccaccccgagagcgacgcgctgctgcgcgtgctgcgcgcgtgcgccaactacgacgagaccatcatcgagatggacccgctgctcgtgctgcacgccgagaagatgctgcagcagctcggcttcgacgaggaccaggccttccgcctcctcatcgcctcgcacttccaacgcccgtgagccagcaagccgcaacggctccaaccatgtagaatagatcaacagctgtggccgcggtcacccaaaggcacccctcagccagcagcagccagctcaggttgaagctcccttcgacttcgaccaccgaaatcgacaaccgttactgcaacacttatccgctatcatatcacttagctgtgttacaacttgatgattggattaaatatcgcctcctaccaacccctcgaagagcagcgatttgctaaaacgtttttctaggcactggtccacacgtggcaacggagttcacggggttcattcccaaaagatccctctcggtctcaagtctcacccctccccagcaatcatggcccgcgaacgcacctacatcatggtcaagcccgacggcgtgcagcgtcacctggtcggcgagatcattaagcgcttcgagaccaagggctacaagctcgtggccctgaagctcgcccgcccgtcggtggagcacctggaggcccactactcggacctggccggccgccccttcttcccggccctcatcaagtacatgagctcgggccccgtgacgtgcatggtctgggagggcaccaacgtggtgctcgagggccgcaagatgctcggcgccaccaagcccaccgagtcggctctgggcacgatccgcggcgacttctgcgtggacgtcggccgcaacgtgtgccacggctcggactcggtcgagtcggccgagaaggagatcaacctctggttcccggagggcgtcgtcgagtggggcgcccaggacgacgagtgggtgtacgagaactgaatgcctcgcgtcgatccagctccagctcaaactcaagtagctccagctgtagccaacgtgacggtcacgccggtgctcgaggacgcggaggcgcagctccccgccccatccgggtgcgcgcactgcacgctcctctagctctagtcagtttaatcaggaaatgaacgctcgggagcgtccctcacggaccctccctgcatttgttgccctgctcactcccttatcgcagctcctcgttgtcctctcattgtagctcctcgttgttgcttgcctgttgtaccgccgcctcttcaattgttctgtggggcgagtggaatatccacgacgagcgttttgctgctggccgctaatttgaggcgctggaaacggctgtggcgcatgcgacgctgtgctggtcacggctgaaatgctgcggatggggtcggcgccatctgtgggggataagaacggccaagtcctcggtgtctctaccactctggcgctgtgtctgcggagctcccgtctcttgggcgatcacattcgcagccatcgaccccgcggagcccgacctcgacttgggctgctgacagctcccgaccgaccgggttcttctggattgacgcacacccccccgccgccgctcgggagataaagtagataggtagagcccccccccctctcctcattacgtgacctgcggacatgcgctcggacgacgactacgaggtgcacgtgctgccggccttcgtgcccgtcttctgggtcttcgtggccgtcggcgtcgtgctcttctactactcgctcggctatgccaagaaatactccaccaccgccgccttcctgctcacggtacgtcggtctattcgtcttctcctactgggctctatagactaagacatgctccttctgcgtgtattgtatgcagccatttatctgcttcagcctcgtgttcgacaacgccatcatggctacaacgggcatcgaccgtcgtcgcgccagcacgcaggccatgctggccttccacgcgtgcgtgacgcccatgctgctgctggtgtgctacgagctggcctacatggtgcacaagcacaagtcggtcaacttctgcggcatctcgttcgagagcggccaccgcgagcgcggcagcagctgcgacaacgccggcgcggcctcgagtctggccagacgccgctggtggctgtccacgtgcctgcgcttcttcgtgtggctcgtgggctgcgcgctgctggtgctcaacctgctcgtgacctaccgctggacgtcggatctcacgcccgagatcgccagcatgtacgagctgcagggggacagcacggcccacgccgtgtgtgccattctaccggcgctggtgcttgtggcgctcgcgctctacatcggcctacggctgtggaactacggcaccaactactcgtacatggtgcacgccacgtgcttcaacccgtggatctggatgctcgtgggggccgtggcgctgctagttggctacctcatgccgtctcccatctacgctctatcctcgaacgccggcgagttgatcatgatggctacaatcgtgcgcatgttccgcgaggtgcaccacgacatgcagcaaggcctgcagttcgacgagtttattgatcccgaaggcgccgctgctcgtcgacagggaccgggaagccccaacaacctgcgcagtatgagcatgagcttcaccaagagcttgagtcgcagcaagatggctgcggaacagcccagcggctacatggcggtgacgaccccgaaggagtcggagctgccggcgacgttcgccaaccgactccgtcgtggggacgaggacggagatgcacagcccagcgcgagtgcagcctacctctcggtcgtcgtggctcgagagcgtacgaacccgctgtgccagtaggaacaggacctttttgattcattggagacccaccctctcctcccgcccacattggcgcagatgtacatgtagaaggctcgaacaatctacttattcccatttttgaacgcactggaagtgaagaccaaaagttgaagtgggcttgtattcgtaggttgtcattacaactgtcggagcgcatactacggaagtggtagaactggcctacctacttgtcacgcttggccattttcttctggctgctgcagaggctctttgaacccgcagcgccagcagttggttcttgtcgtacactttcttcagcgactgcagcaccgcaacttgcttttttaggtccgcgacctccttctccaggcccgcgatctcggccgccactttgcgcttgttgaagcgtttcgtcagcttcgcgatctccgccgtgtcagcagcgcgaaggtcctccatatctgccagtgtctggctgagcgctgcattgccgtcttgctccttcttcagtcgctccttcagcgccgtgatcagactttctgcctcttcatgctcctgtttccccaggtgcacatgcttctccagggcggcaagcttttcagtgaccttggccatggcctcgtgactgtcttccagctgctcctccagctcggcgatctgtctttcggctgcacgcttctccgcctttaggtcttcattttcctgcatcagcaggagagcgacaggctgtccaacagagttcacctgcgcacggcgcacaagttagtcaagtcaacgtgcagcctccacagcgccttcttgtgcagtacctggcttaccgtcgacgaacacttagacgctgcacgcgtggtgagagcactgatccattgccagatcgatgaataagccatagccactggaggaactgcaggctgtcgcggtggtctcttgatctcttggatggctgattcaggaatgaagctgttgagctcacctccactatgttcttcttcgagaaagtccaagcacctgaaggtcgcaagagaagttaagggccgtcgtttctcgctcgtactcaatgcctttgagcagaggtagactggccctgaccataagcacaagagcacagagagcatacattgagcaatgagagcaaaggcaaactctcgtccccagtgttattttaccttagctaggagcgaggcttgagacaggagctctcaggtgagcgtacaggagctcgctatactccgctggagagcacaacgtgagcttccttggtgtgtttttgcttcttctcgagcaccttcatcatcttcgtgctgccttctccggagagcagcttctgcgcctcgagctcctccttgagctgcttcaggcgcttctcctttttcttctttcctggctcgtggccgtggaacttgtacgacagcatacggaaggcctccttcttggtgagcagacgaccaaactcgtcgcggtagtccagcttcacgccgttcttgatgcgtaaatcgtcctcgaagttgcggtcacgtgcatcattcgcacggccggcttggcgctcaacgcgagtctgacggaggtctcccgtcttgcgaagcagcgccaatgtcgcacccatgcccgtgcccaccagtggctgctcttcgccccacacctcattctctttagtctcttcgtcttcatcgttgtcctcctctttcgtctcctcgtcaatctccatgtcgtcttcgtgcttctgctcttcagcggccgcaacttgctgatgcttatcagacgctggcagcgtcggtgctgtagcaccgccagttgcagcctgaaactgggccgcacgcttctccatggcgtcacgtagccgagtctcgaagtcggtagcctcgttgaagaccaccgtgtttgatgtggtgccgacctcgccaaacacttgaccaaccggcttgctactgacagctgcagtgctgctcatcacgacgtcgccagcgctgtcagtagaaacagccggggtcgtatcttcctcgttgctaatcgtttggctaacgagttgcgcgatccgggcctcactggttgtcggtgcaacgggtgtctgcgtctgactctgctgctgtgccaattgccgcgcgcgagccagcgaagcgccaagctccatctctatagcggcggcatcgtccacaatctcgctgtcatcaactgggcgtcgcttcatccgcctcttacccgagctggcagccagcgcctccgacgccacagcattcgccttctctcgcgcctcctgaaagcgaagcaagttctcttcctcctcagggtcttcgtcgtcctcgcgacggctacgcttccgctttccgcggtctttagatccagaagcgccagcctgcagcgcctcctgctccaactgggctaccagcgacacagcgtcccctccctcctcttcagcagctccagactccagctgcacttcaaccgcatcattctcacctaaatcttcatcatgatgacgacgcgatttcttcttcttcttctttctcagtttcttgttcttcttcttggcaaactgcgcttccacctcctccttcgtgtagtaatcctccgcctgcttggtgcgatccatggacagcgaaatcaccgccacgtcgtcctcttcttcctgcttcccctcactctccagcaccgctgatcctcccgtagcgtccagcttaaacttcctcgcctccgcggcctccgccacgtcctgctcctcgtcatactgggccaacaacttagtcccgttcttcctcttcctggagctccccatctcaataaactcatcgtcatcgtagcctgagtacacgggcattgcggcacgcttggcgcgcgcctggtgctccaaccgccggtctttttcactcagctcgacgttcacgagctcgtcctccgcctcattgaggtccttgccgtcctcaccgagcacgcgtgaatccttcaacgtgagtacaacttcctgtccgtcctcaaaggtgtccagcgcgtgacccacagtcataccagccagcgcggcggcgtcatacttctcctccttctcagccttcttctcctccgtcttcttctcctccttcttgttcctggactgcttgacccactccagagcatcatggctacccttcttttgacccttcttttgcgcctccaggtcctcttttaactgctcgccgagcgatttaccggctaatttttgggttaattcgcgccttgtgcgcgactgctgcagcttgcgcttgagctcctgctgctcgcgctcggcctcgagctgcgcgctgctcttctgcacgctgacgaccgcctgctccttcttggaggggcccacggacagcggcttgagcccgagcgatagccgcagcttgttggtctcctcgatgctcagcgagatctcgccgttcttgtcgtcgccctgagcgggcggaggcgacgcgtcctcgcggcgcctgctgcgcgtttggctccggcttcgactcctgctgcgactgcggcggcgggacgaggacgcgtggcggtcgcggcgcgacgaggaggaggaggggcccccatgacgccgagagcgggcaggagaccgcgaccgagagcgactgcgacccatgcttaactgtggggatttttgtatgggcggaattatgggtacagtcatggtgtggtgcacattggttttagaggagatggatacattttgtgagagatggctatggctacattcatggtgtcgacttcaacttcaggggcaaagtgaatgcattattccttcgctttcgtaagtagcatataggggttcctgcgaagtcgtcggcgtggacagctgacattttgcaggaaatgttttttcctcacgggatttgactggctttcattatgcgactgttgccatccatttcttctgagcaaacgtaagcgggagccgccgacgcttacatcaagtccttcattggctaaaatttgacagcaacacacaaagaacatcgacccaacagcaacatgagtgatggaggctcgcaacgcgcttttgctcaagcgcggagtaccagtcatgctgacgtcgaggcgatacgcgatgtatgcgtcaccaagcaaacaagagaaaagtacaagagcagcctcaacgggattaagaagtggatcaggagcgagctcgctaaggaggatgagaacatcgccaggtttttcgacgctgatgatgacattaatctaagtgagtttacaccgagtgtttttgagcgttttctggtgttcaagagcgcttctgtgaagacggctacgctgagcgggtaccgaagtgctatcaaggatctttatcgcgtggagcgcgtggcgctgcctcctgagtacggtgatgatatgaagcaactgttctgcggtatgaagcggatggaggctgatcaggcccagactagcaccccaaagacatcaggaaaacagccactcacgtactccctttataaggagttgtgcaattcgactctcgtggcgggtgatggcgggttttcgcatcttttttttacttcgcagtggaatttgatgtgtcgctcaatgtcggtccagaccctccaaagtcagcatctcgtggcgaaagatgatagcgttggagtaatatttgtgaagacgaagactaaccaggagggttcagggccccgtgatccacgccacctgtacgtgaacctgctgagcccatcaacgtgctgggtgactgccttggcaatttatcttgcatgccaccctccattggaaccgggggcactatttccaggctctaaccagaagctacgatttagcaaggtgctgactaaccttttgaagcaaggagacgctggtaaaagttacggtacgcactcggtgcccaaaggagtggctacattcgcttgtggaggacctacaggtggtccctcgatcgtgagtgtgtgtcttcgctgcggatggagcctcggtggagttcaagatcgctatttccgttatgaagccgcaggggatcaattcctggggcgagtagtggcaggacttcccgtaaatgactctaagttcgctactttaccgccccattttcaggatggccccgataaaaatgtgaaatcgcgcgtggagactatgtttccggttctctctcgtgaagcgaatatggcaggaattttgcggttgtgcctagcatcactcgtgcatcacgcggaatatttgcaacagcatttaccggccacccatgcattactttcgacacatttgtttacaagccccactgtctttaggacgcttgaaggccaactagtagctggagagtctgtctggatgcaaccaacggggataccgccctatattgagctatacaagaagcttgaccagcagcaaagatcaattgatgagctgcctggcaaactggagcagagaatggagcatgtacttgagaaaaagggtgtggcagcgggcaatattacgagagagttattgcgtgatgaaattcgatcgttgttagacgaagttgggctcgaacagcgtccgtcgatcaacgccgtagtgccagcgccagttccagtgcaccagtatcatgtctgggacgggaaatctcatgtgctacctagagagtttagttttccgaatatcgatccccttggggcatggatgctatggtggttcggaaatccaaagctcaactaccccccgtacaaaggaataccatcggacgacctggatacaccgcagaaaaaagcgacgcagtcagaatggtcaattatgatgcggcacattatgaatgggatcgaggccaagctggacgcacctatgccagaaatccgtgacaaaaaacacgctattgagcttttcaacattggatacggtacactgcggttaaagccaagcaaacgtaagcgaagagctgacagcttaagcttacaactgttttgcgactcatccgacaagccgatcatgtacaagtccgagttgtacaccacgtggtaggcgatctgcgccaggtaaatcacttacatgcgtccattctggcatcgatacgcccagatctgagttaacaacacggaccgcttgtgcgacatcgtctggtacagactgatgatacccatgaggaggatctgcatgaccactgcgccaggtagcaagctgatagcaacagtatccgcgtatcgactgcggaacgtgttgaggttcatgcccacgcggttggctacgttggggtcgatgtagtgctcccattcccacaaagaattgaaaaagttgtgaatgcagacgactgcagcgctgcagagaggaacatcgtcgggggaatgcaccatcagtccgtagctgacccagtgcttggagatctcgcacgtatcttcaatgtagacgccggtcgtgttcactgctcgcacacgacagccaccatagtaagctcgaaggtaagtctgcaccacactcgacgctccattcttcgttttcgttttatccgctggaactgatcgtgcgatatgaggcaggctgctagtgaagctgtacgggaacagcgtcaattcatccggaaccacttccaatagatctcgaccattcgtgtcaagcgccagctttgagcccacaagatcatcggtaatttcaaccacaggacggcattctgggtagtcggggaagacgtgagtgtccacggctggaacctgaccgaaatccgtgctgccctctgttgtagggtactggaagagtctcacaacggacatcatagtccacccggtgacgcactcgtcggcgtgttcaatggctagctccagctcccgcatcatttgtggggagaggttgagcttcgctatcttgataatgttgtagagttcctgtgcagtccccgtgacgacgattgtgacgtcccccactcgttcttgctgctctgacagagtgttccattcgcgtccagagcgtccgagaacgtgagcacctcgtcactgagagagctgaagtcgtacagcgacacgtttggggctaatgatgtgaaggtgaagaacggcggcgcggaggtgatggctacatcctcgatcagcttgtacttgagcatgacgatcttgcacggaccaaggcaccccgtgcagcctccagccatggacggatctcgctccgtaaacgcgaagatgctctcgtcagccttgatgaagaccgcggcgtccgacaaatacccggtagcagcaaacagcagcaacagtgcgatcgggcccgcaacgattcttccagcaatagcgacgtacgctgcgagcgcagaggggcggaggagagacccccatccttgcgtcttgcgagccgcagcctgctcgttgaaatacgccgcagaccagtgcctagatccgacttcacccctggcacggccggtcatctcgtcgccgtgagtcgtacgtggtcagaggacagaattccccgaccaagtcctgctgccaagtgtccgggtggttgctttggaatgtgggtggtcggccacgtcgagaccttgacctccgccgcactccagaaaatagcctcgtcgtgaccaaaggctcgtcctgaaacccacttgacttcaacggatgtgtgtgcgccaacatcggcggtatttttaaatgtctttaaaaagacatccaagccctaaaagcaacgctgctggggttgacaggtccaaagcattgcctgttcctatcgcttcttaggtcaaccacccagaaatgaagaagcgacctcgatatattgcactaacattttcaatgcaattttcacttggaatgcagtacgtacacatgcatttcagagctcactagcgggagcaagtcgatctgcacgagtctcatctatatgtagcgctccgtactgggtacccctttcacttcaacgtcgaagatctctctggttagtcgttacttgatcacaaaccgccgctaacccactgctcattctccaacccaccgccaaccccctcccactatgttcgtgccggtgatcgacatctcgcccttcgttaatgaatccgccagctccagcgccgcgcgcgaccgagtggtggagcaagtggcggacgcctgtcgcaacgtcggcttcctggtcatcaccaaccacggcgttccccctgaaaccatcagcgcagcgttcgaagctgcgcgggactatttcgaccaaccgtcggacgtcaagatgcaggtccccatgtcccccgagtacccctacggctacgagagcgccgagatcctgtccaactcgcgcgaaaaggacgacgggaaggctctccccgacctgaaagagaccttccaagtgtgtgtcggaccggaaggacgcgagctcaacgtcccgacccgatggcccgaaggacccgaggggtttaaggacgccatgacgacgtactaccggagcgtggagaagctcgcggcgctcatgatgaaggtcttcgcctgtgcgttgaagctgccgagagactttttcgaccagaagatcggcaaccacatgtcatcgctgaggatcttgtaagtgacgagattaaagagggaaggaggttgctgtctaatgaactcgtggtgtgttgtctttggtaggaattacccgcatcaagaccaagagcctggcacggagcagatccgagcgtcggcgcatacggactacggcagtctgacgatcttggcggtggacgacgctcctggagggctgcaagtgcgtgatttacaaggagagtggcacagtgtgaaggcccccgccaactcgtacgtggtcaacctcggagatttgatgcagcactggaccaacgataagtggcgctcgacgatgcaccgagtgatcaacccgccgtcgggctgcgccaacaaccgacgtcagtccatcgcctttttccacaatatcaacgccgataccattgtggaatgcatcccaacgtgccagtctccggagaacccggccaaatacccgccagtacttgccggtgaatatctgatgatgaagcacaacgctgccgtcggaagctgaaagtgtggtgtagctgtacactaccagtatggcgatgaatagtacgtgcttgatcgcagtcgacgaagttgcggaaagtaaacctaatttcatgtggagtacttcgaaacgattccagctaggttgcctagcttttcaaaacaaaattccccgtagtacatgtagaagagagttcagtagtctttatgactgacggcctctgttcattgggaatcatattttcgatcgaagctacgctttgttggacgtacccccgactccgtagtcgcccagattctcctctcatgggagttaccggtctctaccaggtgatgtggcaccagcgatccgtgctgctgacgctcatccatgccagaacggccacgtgcgggtgatctagctggcacagagttcgtactatctcatctacaactcggacttgtatacgccactggaactctgacctggaatcgatcgcaaacctcacgtgctgctttttcgccttctcatactcctttatcaacttgaacaaggcgtgatcaggaggaagaccagaagctagaccgccactttcggctcgtacgggagaaatgggagaccatgcagatcgctctcacgatttctgttccgagtgctgttgctctccattcagcgaattccactcgtggtgatttttttctctctcaaaacgccgaggtttttcgtaaactttctactcgtggagcaaagtacttagtgtattttacgtgtctttcgctggcaaatgcgtgcttcaccacttcaagcccgttgacgatctaatagcggagactgcctgttgcaacgacttcagctcgacaagccacggacgctgtagcatgaccaaccaagaccctcctaccgattgggcgcttgagcactaccaccagcaactactaaaccgcaagacacgatcaagtacaagctggttccatccgtccggcatcgccgcgttactagcagtcacaggccgagttgtcatcgggccgctcgcgctattcctccttttcgtcgccaccaagtacctctcagacgcccctgtcctcatcaagcccagcgccagcttgttctcgttcactgagaaggatttatcgatggctggagggtgcacagggtgccttggagcatgcaaaatcactctgctcaagctcagtttgttcagtgataaggcgttcgtcagtgccccgacattcgcagccctcgtcagccaacccccaacggaatcgctctacgacttcagctctttgaacagtgatgttctagctctcggagaggaattggatggtgacggtaccatttgccacagcggcatcaacgagtgggggtctaccacggtcatggccacgagcacgccgcagcagatactgaacatcgtctcgacactcaacatcggcgtgtctctgcagacgcagcgtgagctggagctggctgtcgagcgagaggacgagtgcaaggcgacctggacgatattcgggactgcgcggctctacttgtacccgactggcgctggcaacggcgagttcggcaagatccccgccgccacattcagcgtcttccctgaattcaccgagtgccggccagacgtcgaggtcgagtatacgaattccaagctcgcactagccaccgatggcgaggatctgctcgcacaagtccccgatgtgttgacgctgtttccctagcagcatgagcgaagtctcgcgcattgttccagccactaacacgaagtatggggccgcgactgttgtggagcctgaactgcaagcgtactacggaggctgccgcgttcgagaagtcaacacgtcgggcgtctacatcgaagacacgtgcgagatctccaagcactgggcgacgtatgggttgatggtgcagtctcccgacgacattcctctctgcagcactaaagacgtctgcatccacaactacttcaacacgcaatgggaaggactggtggaggtggaccctcaaaaccccaaccgagtcgcgctctacctcaacaccttccgcagtcgatacggtgacaccgtcgggatcaacctcctccctggtattgtggtcacgcagatcctcctcatgggcgtcgtgagtctgtaccaggtgatgccacacagacgatcggtgctgctcacccagatctgggcttatcgatgccagaacggccgcatgcagatcgtctacctggctcagatcacctaccacttctactacaactcggacctgtacatgcttgggctcgcgactggtacactcaccggtgaatccatcgcaaacctcacgtgctgcttcttcaccttctcgtactcgttcgtgaacatggtcaaggctcgctcgggtgaccagcagctggacagacactatcgactcatctgggaggccctgcagttgcctgtcacgatttgtgtcggctcgattctgctgtccgtacagcgcacgccgttcgtgtcgattcttaccaagaacgcggagattctacgcaagacttcagctcgtggtgccaagtactgcgggttaaacgactcttgcattctcttcgcgtataacatgccgtcggtggtggtgatcctgtccttaactccaactgtcatcacctcgctcatcgccaaactgtttacttcgaaggtaaattctgtgaacggtacttttggctcgaagagtgcaggtaacaaggtctcagcggctggagtgagtatcacgaagaagagggagtatgaagtcaactcggccacacccgaggagctcacgtcgttcgagaagaactgtattggcgctccattcactaaattattccacgactgcgaagatatcgcgtacgtctcgtacaatggtaagagatgcatcacgactgaggcgctgctgctcacggggtatctctactatggcgagcacatctaccaggcgacggcggtgatgctgctgttggttgctcgattggtaccgcagcgaatgctacgaacgttcaatgtaatactgctccgttggcgcgtagacccgcaagatggcacgctgacttacccattatcgtgcacttggtacactgcgagcaccgagaaccacagactcggaatggctacaccgatagcctagaggtcgaccaaaatgagctcgagcttgatcgctacagcgcgtgacgcctaaatccattattcaatctaccaaagcgttccacttcaatggcgatgccgcgagcaatatccagcagtgcatcgtttcgactcgaaactttggcttcatgattcttggatcgggatcccaccagatttgcacattgtttatgctcacgcatgagcaggcatcaacaaactaggatatgccctttggacttgaaatcggcactttggaaacctttaattaggcaccatacaaagatctatatattagtatggtaaagtgaagcatttgatttagagaatgtgttctacaagtcgctatcaacagtgtttgtgttcctggcaagagatatattcatggggccgagtgtgaatcgttctcacaccgggactaattcacgggtagtcccgacactgcgtcgatcaagattttcagtctgtgtggtggtgatgccaggtccaccaagctagagagctgttgttacccataatatgtgataaattccatgatgcgcaacagcgcgcaggtacagtgtagctgctccttgctcgttctgtggtatccacaagccaatgtaaggtaacgaagatttgataataagtcgattgccaggctacatgtagttagtttattatactgggataggaagcaacgttagtgctgctatcgcagaccaaataggattatatccgtggtacgtcaagtcaaaaggtgacccctcttgacacctaactggaacattgtcctgaaaccggtgtgaccccggtgccgcactgaaggtttatatgtggggaagctgaactggtaggatacccatcacaccggtatggccgcggtaccacactcggcttccaaaaggtttatatgcgtgggcagattgaaccggtatgagtcagtaacatatatcgaatagtaggagtgaagtaaagtgaatgattgaagcgggcagaagcatacaaaggtaaacattttcattttctacaagctacaaacagatctcgagcaaggttcgttttatcactgtgtataagcaccgccaaggcatatcatgtatctacaattttgaggtgaattaccgggcagacgccgcggctgcgaagcagacgccgcggctgcgaagcaggcgcaggagatgcccgtggttcgtaaaaaaactcataataatagaaagcgattataccaaaaacctcctatcccagccttcgcggagccctagtttaaaatacttactttggtatattggtctgttacgattgcctggtcgacccagccccatcttataatttggcaggtacggctgccgcggaatgcgctgccatgtatgagagcttcattggcgtgccaaatgcacagagcagagggaggtcgagctagcacgaattatattggcgcgaagcttgaaggcatagtgacgaaagtaacgggaggagggtggtggcagtggttattgtagcggcgacggaatgagtgtttctagtagttctagcccagttgctactgcgctagataagataaaagcaccgagaaatacatgtaccaacgacataaccatcaatggaccactatttactatagaaccaagcctgaagccattctcataaacaaggacattttgaaaactccatctaggtactttcgattgtttatgtaccaagtgcctagtttgttgatgcctgcgcatgagtctggctgggtacattgccatgtcatcactttgcaaattgcagtgcagtgcccgactcaagtgaaggcgaatacgattctgatctccatgcgtggtagacctatgatttcggggctgaagcggacgctattgctgttgttagtggcgaagggggtcgaaggtgccagtattctgacgaccgactgcagtgatctctgcggccaacccaccccctgcatcatcgatgattcggacgggtattcgtgtcttgagggctatagcgatctcggaaacgctatctgcctccttggcgcgatggagctgggtccagacgtaacgcaaatgtacgttatgctgttcatgagtgaactaactttcgtgcactaacgcagattcgctaacgcccccaatacatgtagcacgcttgctggtggaaacaaatcagaccgtgttacgagaggcgtcgtgtcctcggtggatttcagacctgacttcgctatcgaagcgatccaagcggccgacgtcgcgatcgttagcctgaatatgtcggctgccgttgcccggctcccgccgtttctaccagcgacgactactcggttgcgtctcgagaatgacctgttgactgggttccccacgcttgctctgcttccccttcagtcgctttcgcatctgtgagtatcactcctgggttcattgtacacggacttcagactaaacaaatactgggtttactctgcgagcaggaatctggattccaattggatcgaggacgtcgatgtcagcgcttactcgaacagcctcgtatcactgtaagtcccttgggtcgtgctgcttttatttattttacaaaatattcctcttctcacaatagcaatgtcgtggactgaaatgtagaagcctacgagccaacgatatgcactcattcgaagggtactttcctaagctgcacactctgtaagtgcttttctgctatctgccttttttttttacatattcattaacctgaggatgccttatttcgtatttgtagagatttatcgcacaaccgtttttctgccatccctgaaagcgtagttctcttccgtcatctgaaaacattgtacgcaactctatagagccacccaatcaatcgatgcgatgaagtactaaaagttattgatgcaggcgcatgaaaggcaacgctcctttatcgcgcgattttacagcaatccaagctgacttcctccgcaatctgacgtgggatctcgaagaagaagatttcgatgctctgagcggatgcgattcagacctgcagcaaattcacggactctcggtctgcatcgctgacgctacggagagacctagtgccagcggtgcactgatgcgttcgaatacacccgtggagcggaagctgtacagctactcctattcgtgtccaggttattattccggcggcgtgcttgctggctgcgtggtcggcactgcagtcgttatggcgctcgtcggtgtgttcctgtggaggtggcagaagcagaagcagtctccaagcgtaccgcccggctctgacaatacgccgaccaagaacacgaatgaatcgtacgcatcggtatggcaagacccgcaacttctagcaattcagctgaaagccgacgagattgaagacgtgagaaaaatcggcggcggagcgtacgcagatgtgtggcttgtcaagtatcgtgggactcaattgctggcttccaagcgcttgcgaaaagtgttcgaaactcagcagaacacgcagaatttcctcgaggagatcaaaatggtcgcgaactttgaccaccccaacatcgtcaagctggttggagccgcctggatgacggagtcggatctgcaagcgctgtcagagtacatggtcggtggagatctccgcgagttcctgatctacccccacactcctcgcacgtgggctgccaggaagctggagattgccacggatgtgattgaggcgctcgtgtacctgcactcgtttatccctccaattgtgcatcgcgatctcaagtcccgcaacattttgctttcgagagaaatgcgagccaagttgacggactttggtgtctctcgcatcatgtcggaagagaataccatgacacaaggcgtggggacgagtaggtgggaggctcctgaagttttggcgggtaaggaagactacaaccaggcggcggacatcttcagcttcggagtggtgctctctgaactcgacacgcacgcgatcccgtatgaagacgcacgaggaccgagcaacaatccgctggcaaatgtagccatcctgcagatgatcgcggtgggggccattcgaccgagcttttcgccacactgccctccagacattcgtgctttggcgaaccgttgtctcgctcatgatccagatgaccgtcccacggctccggaggtagcatacgctttacggaccttgactttgtaggaatttttggaaaccacgtacgagaaccagtctttacgaactgttggttaaattggtatgaagcacaccctgcttgcaaggactattcctcttttttatttattttttcttgtacactggtgcagctttcgagtgtcaaaggcacatgcacccagtctaactgagttctcttgatggctcaaaacaggttgatgaagaaaaaacacgtcaggattacactgagaaacaccttgatcgctctaaggtgctggtacttcgtgacaccaaatacgataaatcaaagtgtcttactacgtagtctcatcatttttttcttgcttttttttctaatatgagagcatcaccaaaatacgcacctccttttttgctgtagaatcgggtactaagtacttcgaagtagtcatatgtataaagtaaaactacgctcaaaactaagatacacggatggacatcgcgcgcagtgaaaaatgtagaagttctacactagaaccaaatagcgcctcgttgtaattccgtatttgttgccaacgtggagatatctctagtagcgtgggttgacttggcgtttagccagaaattccgtgtaatacgggtagttcctgtttctggcgagcttggcccccttcagtcctgtcagtcccagcatcatcatcacatagtcgtccgatctccctgcttcagcccaaatctgtgctcttgccgtcatttcagccggagtagccttgtcactcacgagcttgggaagatgatacccagagcccatcgttgaaataacactgtcgtcgaacgcgttcacataacgcttgtagattcggtacgcgttcgtgttcttgacctgctcaatctgcgccagacttgtgacgcgacccaagccgagttctacccagatatcgtacgtagggaagcctcctcgagcccatttattcagccgatacatttccgccgtgtccacatatttcacgagcagattgtaattcttgtgggacgtcagtgcggtcccagaaagcccctccatcttcagcgccttcttgacgtagtcttcggtcaaactcgagcccgaacgccatcctcaccttgatagggatcttgtctacgagtttcgaccatagtgacttcgcctcactcctctttcctcggtgttgtcgtccttggtgagtcttagagatcgcgtttgagtggcaacgcggtcgtcagcggcaacgaaagcttgcgatagacagtcgcgcgactcgaacgacgacattttggtctttctgacccccgctgctgctagggaaacgttgctggcgccgacaaccatgaacatcatcgccaataaaaaatgatgcgaacgcatcttggacacagagagaagcagcagctgtggcagttccctcgagggcgaatgccgaactgagtccaaccaaaacgatgagactttgccccttacacgtttacacgtcgagtaaacatcgtggcctctcatgtttacagagatcaaatcgtaagatgatttagtacgcaacacgcccagcttagaactcaagggacaattgatcatcttctctttagtgcgccaatacttctgtttagaatgatggaaggattcccggaaaatattcgcagtttggacgtctgccgccagagcttgcagcttttattgacggtgatacgagtagaacacatcgttgtactgtagccgacaactcaacggatgttctagcgtgctatacatactgttttggtagagaattcccactaaagaacagagtcggcacgtccaagtcttatttttaaagacttggacgtgaaacaaacttctccattaaactggaggagtactaataccaagtcgaaagagcaaatatttaagcagcctctgctgcagcaaagtttggacgcagttattcccaagagcagcacgtgcatgtagatctacgtgtttctcgaatgagctcacgtttctgaccagggtcgtcaggatctaaaaacgacccgtcctggtgcttgaagccaacagagtgccaacaaagttgctgatctattagtgacgttcctcacgttcccccattctgaggaggatatagacacctggacaacggacacctggacttgaaacgactttcgccccagataggctatcgtggtgtcctctgagctgagctgagctcagcttgttgttatctgtcgagcgaccatgactgcaggcgacaagtacaatgtggaggtcgaagaccatgggggctgggcgaaggagtatcacgcggcgcagcggcaggagcgcgagagtcatcgctggacgaatctgctcaagccgtccgtcatcggggcgcttttagccgtagctggacgcattgtggtgtggcctctagcgttgctggtggtcttcacgtcaaccagctatctgtcgcacggcaacgtcctcattctagtcgatgacagcatctacgcgttcacggagcaagacccgacgatggctggagggtgcacgggatgcctgggtcttaacaaagtctgcttgatcaagtacagcatcttcgcgcaggacgcgctcatcggagcgacaacgttcaagagcttcgccggacgctctccagatctgtcactgtacgacttcagcacgttaagcgcggaagctctcgagctcggagagaaactcgacgcgaaaggcgtgtactgccagagtggagtgaacgagtgggggtccatgactgcaggcatcgctggaagtgctcaagacattctggacgtcgtgaatactctgaacctaaacatcgcgccgcaattccaacgcgaactcgagattgcagtggctggtaaagctctgtgcgagtcgggatggaacatctacactatcacacggttgttcctgtatccgactgtcaagggcagcatcaacttcgccagcatccctggcatcgacttcaatatcttcccagactacaccgaatgccgccctgatgtgactatcgacgacaatttagttggctccaagctcgcactcgcaactaacggcgaagacctgctagcagtattcccggatctactcaagttgtttccgtacaacttcgagagcagcattcctccagtgccacgcgctgctccggctggaacgacaaagtacggcttcacttccgtgctgcagcctcttttcaaaggttattacggcggctgccgcgttcgtgctgtcaacacaaccggcgtctacattgaggatacctgtgacgtctcaaagcgctggtcttcctacggactcatgatccactcccccgacgacattccaatgtgctccacgggcgacgtgtgcattcacaactacttcaactcgatctgggagtgggtcaactacgtcaacgaagataatccgacgcgcattggcatgaacctcaacacgtttcgaagccgctacggcgacaccgtcgccctcagtattttaccgggcattgtggtcatgcagatgctgctcatgggcatgatcagtctctaccaggtgatgtcgcacaaccaatcggtgctgctgacgcagatttgggcctatcgctgccagaatggacgcatgcaggtggtctacctcgcgcagatcacgtaccacatcgtctacaattctgacttgtacatgctcggcctctcgacgggcacgttgtcgaccgagtcggtcatgaacctcacgtgctgcatcttcaccttctcgtactcgttcgtgaacttggccaaggctcgatcaggagatcagcagctggatcgccacttccgcctcacgtgggagaccatgcagatcgtcatcacctccaccgtggccgccattctgctgtccgtccaatcgactcctctggaattcatcacggcgcagaacggcgaaattctacgcaagacttccgctcgcggagccaaatactgcggtctgaacgactcgtgcgtcgtgtacaagaccaacttgatcatcttcatcctcatcttctcggtcggtttgggtatcgtggccgctctgtcttcgctcatcgtcaagcgcctgagtccgaaggtcaagagcgccgtgatgtccgccagaatgtcgctgacgggtcaaggcagcttcaagcacagccgaagcagtcgaacttcagttccggatccgaatggagctcctccgacgatcgagggtattatcaagaagaagtccgtcaacgacggtctcacctccttcgaacggaactgcatcggaggaccattccgaaagttgttccgagactgcgacgacatggcctacgtcatgtacaaggggaagagatgcacgactgtcgaggcgcttctactcacggggtatctgtactacggagagcacgtgtaccaggcctcgtccgtgatgatgcttctgcttggacgcatgctgcccaaaaagatgctacgcaccttcaacctgctgctgctgcgctggcacgtggacaagcagaccggagcactaactcaagtcttgtcctgtccgtggtacgctgccagccaggagaaccactcgcttagcggagcctcgcccgtgccttaaaacttatgatactcagatgaacttcaacatgcactggaatgactgcagcacatacacataccgtagactatattctgtgtcgtgcttgcactaattagatccgacccaattttagatctgcacaaacgacgtgttctttttttagtcctacacaaaaaatgacgtgttctcattcgtccattatcggtaacaatgcacgacggaggcaatacgttgacaagccgaggagtgccctcctcgccgcggcgccggagtgaggatctggagggcggcgcggcgcgcgcgcggcggccatctgcctctgctcgagtggtgggggccaagcgccgtttgtggcactacgcggtgccgctgctgctgctcgtggcgacaatctactcgttctcccatgtggagcagagggccgtagagcagaccaccaagacgcgggacgaatcgtccaccaagacccaagggggcacgttaactcatatcgacgacaacgagttaacaactcagggagatgggcaactgccctcttattcgacggacaagggcattattatgtgcatgcacaatggtgtcgtcccattggggctgtcgctagtgcgggagcttcgctgcctgggcaacacggagctgatccagatttaccactgcttccccgaggaaatgtccaactcgtcgcgtaaactgctgttcgaggcggacaacaacctcgagattgtggacgtctgcacggacctcgtgaagcagggcaagctctcggaggacagggccagacacttccgtagctggtggatcaagcctctcgctgtgtaccacaccaagatcaaggagttgctgctggtggacatcgacgacatcttcatgcgcgacccggccgtgctgcggaccaccgaggggtaccaccgcacgggtacaaccttcttctacgaccgagtgctgtccagcacggagttcttcaaccaggacgtggacggcgagcagtacctgaagaagttgcttaacgagttcgactacaccaagttcaaccttccgaccggatccacgccgtctgcgcacctgagcccaaagacgtcgtacgcgtggcgccgccagacgtcgcacgagcaggactcgtcgctcgtggctattgacaagtcccgcgcgggcaaagccatggacgtgctgttcttcctgatcacggagcagcactttgtgcatgaattttcgtacggagacaaggagagcttctggatcgcgtatgaattggccaagcaggaatatttcttctcgccgtggggcgtggggggcatctcgtcttctacgaacaaggacctggagaagcacgaggactcgctctgtggtagcatcgtgcagtacatgcctgtggaggacgagacgaccgagtccgagctgctctacgtgaacggcaaggcgctgctgaacccgttccccgtggctatggacaagctgggcactgccacgcacaacgtgctcttcaacacgaacccgacgcacctcacgccccgccagaagcggaggggcaacggtcagaccacgaccaactacaagggcggatatgccatggagtgcctggtgggcttcggttccgagccgctgccggtgaagttcgcgccccaattgctgcgacgacgtatgttctactttggcatccgcatgggtgtgctatccgcactcgaccagtgttttccctttgaaggaatgaagtaggagcgtatgttgcccagagcggtgttggaagaacatcgctgctgcaccgagatggtcaattgtacacaaatttcaagtgctgcttacatacccgcacccccttcctgtactcaaattctggaggaggatgcatttcatccggtatcgtcatcagctttctggtgtactgaagtaatcttctaaagtgcttaatctccgatgcagtgctctgcatagcgtacaaatcaacgttcgcccggcctcacactttgctattcgcgaccaatcaaaccacaggaacgggagttgcaggccaccccagccacgcctctccgctacttcctagtgttcgctaccgccaccgtcatctcaagcgtcaatgttgccctggaatcaccgatcgctgcgataccctccaccttctccccagcagcagcctacacggtctttaatgactagagcgatgaaacttcgcggtggtttacgagagctatggatgaagacgatggagagagagcggggccgcctgcagctgcaactgcaactgggaaggcaaaaagctggctcgcttcgtcggattgctcaagcattggctggactctggaaagctcgttgacgatgtttttcactaaactggaggtttatcgcagttcgctgcatggctccagtatgcagacgatttcgccaagaagaacccggacaagccaaatttgctgatctcaactttagcgtggcattgcggcgacgaacccccaccaggaacgaattgtatcgcttagtattcgctgggggtggaagcagtcgccaaggcgacggaaaccttctctccaccgatgggtttcaactgtggaggaagtgtcttgacgggttcaacaggatgtaccccgaacagaaagctaatgtcatcgagacgctgccgagtacggagaaattggcagcgaatttgcaggggttattagaatccctccgcctcagcactttggcggtcatttcgtccacgcacatccgagttaaaagccgtgcaagctgtatactcgttgcaacccgtcttgagaagactctatgctctaaaggcggatcacactcacagcagtgaaacatcatccggtggtatgtttgaccctgaagtacacaatatgtgtaccgttaaagcgaagtagcgccctcccacttgtcggaaagctttgacatgaactcggctgggttgcattcttttttatattaaaatcagcgagacaaagctttgggggttgtacactcaggaaaaaaatcccaaagtgtttgagtttattggagtttcattgactacagaactgataagcctagaaggcctattcatacttcgcattgtagctctcgcggtactttcggtaagtcagtctttccacactgtctgctgctgttccctttaccttcagccacttggatacaaagtcctgagcttgtttttcttccagccacttcgaaagttgggtcttctgtagtgccttggctctttgcgatgttttcgagtaactcttgccgacgatgataatcttggtgagagcttcatcgtcgaattcctccatcaatacctcaaacaaagatgtcttctgttctttccgccgaaacgcgtctggtaggagacccaaatgctaaaaagtggatccgctaagagatcgtcgcctgcccctttcaaatccagcaactcgaacaggagatggggtgacgtctgactgctcatccaccctttcatctgctccgtttccatttcttttgcgagtttcgctgtgtcgggtttcgcctttaactcaataatcatcttcgccagagcttcgtctccatagcgtgctgtcaagatcgcgttcgtcgactcttgcgttccagggtgcttcgtcttgaagaagtcgacgtactcgagccacgtttctagctgcggcttgtcgaaagagtttatcccccgcgctgttcaccgcccagttgtacttgctgacgtacgtttgcaagagcgcatcagacgtacccgcgttcagcagcttggagacttctgtcgggtctttcagctcacgcattcacatgttgagcagtgcgagctgcaagttcgccgccaccttctccgtactcgggttcttcttcgccaagctcagcatttgagccagcgcttcgtccgtgtagtagcccagcaggatgtcgatgacagtggttttctgtttggggtgcatctggttaaatcggtcgaggtactttctccagagttggaaatgaccgctggtgagaaggttgtccgtcgccttgcttattttctgctcagcaaaagtattgtccgaagtccacaccgttcgatacttgtccttcatcgcagccctaccgactaccatggtgaagaaagcaccctcggggtcatgtcgagtcagcaacgaccatttgacatactcggtctctagtctcttggcaaccgcaacggtacttggattcttcatcgccacttcgatcttgtccagtagttcagtaagcagtggtgttttacgaggacagccaaggacaatatgcagtgacgtgacaaggtacaggcgtttacagcggaaaacgaggcccaagatgcggacaagaagcactcggtcgacaagcagtacaaggacggcaagaacagcaagtacatcatggacgccatggggatgagtgagccgagcgaagacagaaggatctggtgagcagtcgccggtgattcaacgacagatggcatggttgcgagctacaacgagatggatacggcgagtgcgggtgacacgaccaacggcatgaacccaacggacggcagtgagaggtcggagagcagcgtgagcttgctcacttgccaatcggcgctgtgaagctcaagcacggagtcgacacagtgaagtacaagggcgagcagatacgacttagcggcgacagcagtgctgtggtgacgaagtagccaagaccggcagacaccgtaatcgctagtaatacaaaaggagtgctcacgtgagtgacgcaccgtcgcgaggacgcaagttgagtcctcggcggccagtgttcgtgttgacgactcagagctatacgaccgaggcaagtactgcgctgaataagcctgtcgctcacttggtggttcatacagggactagtttacacggttgggcggccctgacgatgtgtgaggcggccttcacgaaactagtcccagtgggcaagaacaccgtgcatccagtggtgatttcggtgaagctacctgagggattttgatcgatacgcgtgtgcgagcggagattgagtgacttacttgctggagttcacgtggtgggattgatctctgcagttgtgaggcttgagcagtaggagacgcagaggcagcgaggaagtgttgaccgcgatgccgaaagcgttgaggtggttggatgcaaatttgaaagtgagtttatttcgttaaggcccagtggttggccgtctgggcagtgcccaaggcggtgctagagtaaatcaatctgattggtcaatccacttcaagttgaagtgaattgacgtgcgtcatacaaacgtcaatgtagttgacagaggtaatgcaccatgtgcatgtttcttgcttgtcatgagtgaaggtgcctaaactagactaatgcttacgccctagccttgcacttgaacagggagggccgacgacgtgctcgtcacgtctcgatccttacatcctcccgggttgacttcacgttgacggcgcttgaagtcgtagacgagaactttccagtgcgagacgtgcttgatgtctttctcgagttcccacgaagattcgtggtctgggagaccatgccacttgacaagccactcagtctagcgattgaactggcgcttgcgtagtagttgctcgacaatgtgaaggtcttctccagtgtcttcatctgtgacgatgcgagatgctttcggaagaacacgagtctcaaacttgtccggattggagacgtaatggctgagaacgtctacgttgaacgtagggttcaacgacttcatactgcgtggtaaaatcaaacgggcagcgttgtcgttgatcatgcgcttgatcacgaacggaccaactttacgggccgctaacttcgcacgtttgctgtcaatgtctttcgcaggatgcttgagtgtgatacgccgtgtatccagcataaccaaatctccttccttaaattggacgttgctacgacgttgatcgtagtactgcttttgcgatgcttgagccttgagtaggtgttccttggctttgccgataatcttgtcgcgttcatccttgaagcggtttgcatactcagacagtccttgttgaacttgaactgtggtagacagcgtaggaactgttccgaagggattgcgttccttacgtcctgtgactacttcaaatggcgaaagtccggtagaagcactgactagcgttgcgtgagcatactcaatcgttcccaacttggcagcccagtcatcaccatgatacgagaccatacaacggagtgcatcttctagtaccaggttttgacgttcggtttggccgtcagcttgagcgcggtatgacgttgtcatattcaactgtacacccatgatctgcgcgagagagttccaaaccgtgacgtgaatttgggatcacgatcactgatgatcactgcaggcactccatgatgccgaacgacactgtcgaagaagttatgagcgatttattcggcatcatcggtagtgtgaactggacagtagattggacgcttggacaacttgtccacgacggtcatgatatcattatagccgtctgattctggcaatccagtgccgaaatccatggagacgacttcccaacattccttaggaattggaatcggaatcagcttgccattcttcttggcgttgctgtgcttccaacgtgtgcaggtttcacaactttgcacgtaatcggaaacgtcttcatgaagcgacgcccagtagtaccattgtgtgatacggagatacgtacgacgaattcctgggtgcgcggcaatactggaatcatgaaattgctcgataatcttcgttcttagacgattgcgctgcgatctcgggacacaaagtctcatcactttggactccttgtcgtccgtgaattgcacataaagcaatccatccttgagtacgtatggatcgtttggagaacgatacttgtcgcgaaatccaggaccagtgcggtaggctttgatgaactcttgtttgagattcgaagtccatcctagcgaacttgcgagttgcatttgcacaaccgatgtggcgatctctgcatcttgaacagggatgtggagataaccatcggaaagatcatgtatggcgaggtgaccagcagaagcatcagccatctcctcccccgaaaattcaacaggcgagagagctgaagacaccgtggtcgtattcaccttttgagagtccccatcatgcggtcttgcacgatagcgtgatgcaaaactgtcacactgcggagtacacgtgtgaaagctgatcgtattgatagcgggacgcgcaacactctgcgaatttggaacagtcgagctttcactgtttggcgtttacagcgaagcggtaactgcgtgtagatcgcacactactcgaaaactcgatgtcgttttaccactgtctgactcgcaatgatggacgctgatcgtgttgaccagaggtggagccaatacaagtgatgtaaacgcattcggagttgagtccattggaggacgggacagtgcatcaactacgacattcatcgaccctctgaggtgatgaagtgtgaagtcgaactgaacaaagaaggtcaagaagcgtgcaagcttcgaagaaaccttcgggtggtgtaacaaccactgacatgcactgttgtccgtgtagatgtcgaaatgacgaccataatgacgccatttttccaacgaaagcttgattgcgtagagttccttctcgtgggtaggccaattttgttcatgcacacccaacttcttggataggaaagctaacggatgatcatgtccgttgtgcttttgcgaaagcactccacccacgcagtatcctgaagcatcggttgtcacgatggacggaagagacaaatccggtaaagtcaggactggggcggattgtaatgctgttttcagcttgctgaaggcgatatcatgctcttcattccagttccaggtgtggtccttcttgaccagaggtccaaacggtaaggcgattgtcgcgtagttgtagatgaagcgacggtagtagcctacgagacccaaaaagctttgcaattgcttttggttcatgggaactggccaattggcgatcacttcagtcttcttggaatccaacacgatgccttggctcgacacggtgtgacctaggaactgaacttgattttgcccaaaatgagacttcgaacgatgacagtacagcttctccctgcgtaacacgtcgaaaagtatacggagatgctgcagatgctccttcatgttcttggaaaatacacaaatgtcgtccaagcataccacgataaacgcgtatttgcccaaaaggacacgcatcagacgtgaccagacacctggcattccagcaagacccattggtgcaacacaccactggtaggtctcagaatgagtgcggaacgctgggtactgatgactcttcatggtaaccctcatctgatggtaaccttgcgcgagatccaagactgagaagatgatgcatccatacatcttgtcaaatgtctcgtcaattctcgggagtggaattctggcgatgatcgtctgcgagttgagccaacgataatcaatcacccaacgaatcggtaacgtggcatttcccgatcgtagccactcagctcgagagagttgtttccctgatttcgggtccgtcttcgggataccaaagatgttggagacccagggtgaatcggatagttcgatccaacctttcttcaacttttcctcgacaaacagatcaagggcttattgttctgtcttcgagagccggaaaggtgcgcgtgtgcttggcatagcatctgacttcatgttgagctcgaattccacgcgtcgatgaggaggcaatccatcgggtaaagcgtctggaaagacgtcagcaaactcattcaggagaggcacaatttcttgtggttcctccgtgacggattgagctggagtaaccttaacgcggtaaatctcctcatagtcatggcgcttggctttggctttgaactcagcaccagagacttcaactttgcgcaacaatggtttcaatccttgcggtttgaactgcagatgatgagtacgccaatcgataatcggctgatacttggtaaaccagggttttccgagaatgacatcgtgctcaggactcatagtccactccaggacctctaagtctctgaatctatagccatccatctcaatcgtgaccttgcccttgtgaacagcacgtttcttcgttgtgcttccgtcaaacaaggtgacttgagagatcaatgtgtctggaatagtgtccaccaatccaggacgaatgacattgcatgtggctcccgtgtctaacataatggtgacacgtttgcctttacacagacctggtttccgaatcaactcattcggagctggtagtgactagcgttgagatcatttatctcaacaacttcaacagattctggtttctctgtggccaaagtgtgaacggcgaactgaccacgcttggtgtcagcctgatagctgttgttcgatccatgcttctgtcgattttgaagcttgaagcactgttcaatcgtgtgactaggcttcttacaataccggcacttcttctggttgccactgctgcgattgttgttctgaacagggcgacgataattgtcacggcgtggactatgcacatgaccggtgtcgatttccataggctcaggctcattgtcagcaggacgctgtggagccgtgttggcacgagtgaatgatgaggagttggaacgtccaaaagtccttggaggtgtccaacgactcttgtgaaacggaccagcacgaaagtgcgatctgtcataatcgagtgcaactaagagagcctcagataccgtcgtgcaacgacgatactgaacttcttctttcgtggggctaacaagacctcgaatgaagtacgtgatcttgtcaagctcactcatgtccttgacttgcatgatagcaacgcggaatcgagagatgtagtcctctaagctagaacaacgtttttgcttgagactgtacaatcgatctcgaaggcgctcctgaaggtccggaggaacgaattccttcgtgagcttctggatcaagtcttggacgtcactgatggaatccctgcaaagcatgtaccatgcagcagcatttcccctgaaattggcggtcatcatgccaatgatgcgcttactctgattctcatcttgccaatcaatgttcttcgcctcaaagtagtgaacaacttggtcgaaatacaactcaaccgagttgcccatgtttccatagaaacaaggtaggcttatgccctcaaccatgacttccttgggttgcgaagtcaaaacgtcgattagtgcttgttgcttctgcaccatttcgaccacagactgagtcagacggtcagcagaccatccaccaggattcaacgaagtcatgatagtgtaacttgagcgaaaagctgattaaagttacgctacgaatgcaagctactagctactagaactagagctacgacgacactgtcaacaactactcgaaacgcgcgcgcttgatgctgatgatgcgatcaacgaaggcacgaacttcggtgtcgatacggttgacacagatgttcaggttgtcggcggtctcgtagagaaacagtccaaactcagtctcgatgacacggtcgaggtgagtctcgaaaaacggaaagaacacttcacggaggtgatccgtcaagcaagtaacctcgtactgcaaacgggtagcagcacggatggtgaaagcgcgttgaacggcctgttcgatggtgagaatgcgacgatgttggtgatcttcttcccactcacgagcagtacgcttagacatagacaggaaaaacacccgaagcttacgccaaagcttaccagatacttgaaaattacgcgaaaaaatcaggaaacggctgaaaattacgcggattctccaattcggaattaaacgggtgatggggtgtagggtaactactgattggctcagccaattgtaattgcactaaaacaatgcgaaaaagtcgaaaaacttcacatattaacacctaaacaacgctacttagcgctaattcaagcgttgacgcttggacttggaaatggctgttttctggctgaaaccctgaataagtagctcttcctcttgagctccttcaagtgctctttgacgcgagctctccttaagttcacggtcgaacacagtagtgagcgtgttatggatacgcactacttgtaaacttaggatgtggcaagcttctcgataaagtatacgctcggactctgagcgaaaactcccctcctgagcctgcaggtggtgagtcaaggttgcaaggcggtttactgcaagtaacccctgtaaacgaagtcgatctactgcttgtagatttggttttgggtttggtttacctttttggttgttcaccttggtcattcaaggccaagtgaaacaaaggtttccgcaatatactaggcttacgtgcgtgaaggtgtctagtgaagcgaaaagcgttaaactagtacaatccttcgaataactaaccgttagcgaaaagcgtaaggctagtttagcaaaaatcgactagcgaaaagcgttaatgtcgactatggaagacttttacggctagcgaaaagcgttaatgccgctaagtcagagtgcacgtagagaagcagttaaagcgaaaagcaataaccctaacctggaggttgtagcagtagtcgagctgaagccgaagtagcgaggcgagtcgattggagctcttctgaccacttgcccgtcgaaaattgaccgacttgtgctaccagatgtgaggcttgagcagtaggagacgcagaggccgcgaggaagtgttgaccgcgatgccgaaagcgttgaggtggttggatgcaaatttgaaagtgagtttatttcgttaaggcccagtggccggccgtctgggcagtgcccaaggcggtgctagagtaaatcaatctgattggtcaatccacttcaagttgaagtgaattgacgtgcgtcatacaaacgtcaatgtagttgacagaggtaatgcaccatgtgcatgtttcttgcttgtcatgagtgaaggtgcctaaactagactaatgcttacgccctagccttgcacttgaacagggagggccgacgacgtgctcgtcacgtctcgatccttacagcagtggccttgattgggagctgagtgcgtgcggattgatacaaaggtaagtataacaaagtcggaagcgaggtacccattccttgcccacattgagaagtcggacgcgaggtacccattccttgcccgcattgagaagtcggacgtgaggtacccattccttgcccgcactgattgattgttgaggaggtggacaggttgagaagttgagagaacagtggaggaggctgatcaaagaagttgacgtggctgagtgagtgaattcaaagttgctttggagcgatggacacgatgatacgccagcaaagagaaagcagcggatagagattcaagacgacgctggaggcagcatgctgctgaaacagtcaatgaacgaccccaagaagatgcgagtgcagatggtggtgagcctcgacatgttgatgctgaagaagtgctcggtgaacctgatcgaaggcgtgaagctgccagtgacaggtttgatgattggtgggagtctctgacatcgcaacagcagaaaacagcggtgctggaacgactttcggtgacggagcgtgaagtccctctaatccagcgaacggagtgcaaacaactctctgttgagccgttcatgggtgatgattctatagcagtggaggagtggttggagactgtgacactggaggtggagagacagcgtgttttgatcggttaacaatggacatcgcgtgacctttactatggtgtttcgaagttattcaagggtcccgttgcacggtggtttgtacaggctcactccaaaacccaagaacaagatcgtaatttcgagcacctgatgacgcagttaacgcggatgtacggcagccatgagagtatcattagatacaattggagatggcgaagcgggtgcagcagccaggagaacgtttgcgggactttgctgacagactgcgtgagattggagtcgctcacccagacatcccggaaggctggtatgtcgaaacgttcatccggggcatcaacaacacggactgggcgatggtagtgcgcatccagaaaccaacggcactgagtgatgctgtccagtttgcagtagagaactttggagactacggcgaaggatatcaagtgaagcagtggcagaaagcagcagcactttaccgcggaagacagcattgtaatggtttggcagttggtgaggcgagaaaggaatttcctggtcgcaatccagtgaaaatacaacatcaagacgacgatcgaccgccccgctacgacaccagaggaagacgtcttgcagatcagcgcaacgaatcattctcgccatccgcactacacgcgattgcagtggcggtacgagttgatgaagcagcagtgccgacgacatcacgcagcgctattcgcaactcgaacgaagccgatcgtatcgaaggtgcacggcgtagcggtgacgcttgtgaagtgatccaggtgcgagcagcacacaacccacgcaaacggacaaggcgcagaaatcacagcgaccgaatggcagatccgaaatgttaaggcaaggaaggcatgcagcttgtgtggacagcatgggcattggcatttggagtgtccagatcgaaaacctgcggcaagctaaagcgttggtgaaacctgccaaatcgaggacgatttgagaactgaggctggagagtaagcagtggtgttttacgaggacaaccaaggacaatatgcagtgacgtgacaaggtacaggcgtttacagcggaaaacgaggaccaggatgcggacaagaagcactcggtcgacaagcagtacaaggacggcaagaacagcaagtacatcatggacgccatggggatgagtgagccgagcgaagacagaaggatctggtgagcagtcgccggtgattcaacgacagatggcatggttgcgagctacaacgagatggatacggcgagtgcgggtgacacgaccaacggcatgaacccaacggacggcagtgagaggtcggagagcagcgtgagcttgctcacttgcagatcggcgctgtgaagctcaagcacggagtcgacacagtgaagtacaagggcgagcagatacgacttagcggcgacagcagtgctgtggtgacgaagtagccaagaccggcagacaccgtaatcgctagtaatacaaaaggagtgctcacgtgagtgacgcaccgtcgcgaggacgcaagttgagtcctcggcggccagcagtgttcgtgttgacgactcagagctatacgaccgaggcaagtactgcgctgaataagcctgtcgctcactgttcttcatcattgaagtggcgcaccaaggttctaatccctatatttggttggtccgggttcttcttggcgaagtcgtctgcgtagcgaagccacgaaacaaactgcgggctatcgaagagcttgccctttgcacccagtttcttgaaaacgtcatcgacgagcaagctttttgccttctcaacaacagcaagtgatgaccccactctgtcttcactgtgtctgtccgttgtatcgttagctgtcatgaactgcgccgaggtgtcagcactctgatcaccagaagccaaacgaggagctgctactggtgctgcagagagggtggagaatatcgtgacgttcggggatcccagggcgacatcaacgcttgatatgatagcgacggcagcgaacactatgaagtagggaagaagcatgagtggagtgctcttcagctcaacttctcggggttgcggctcgagaatttacagactgtgaaggattttcgcgtacatgttgtgagcgttgaattatccatcatggtgatgtgatgatgtgtgtggagagattacgatagccctgaggaaattgtgctaaatttttgtcaacatttaaccccttcaacccgacggattttgagggtgagctaagctgtatatacagcataattttatctagaagtttgtatactcgagggttgcggcgggaaggcggagaaaaaggcggtgacgcagacactacgtaaagctattcttacgctgtattggatgtactaccgtcggtatatacagcgccattaagctgtataagcatgcactcgcactactcttgcccatgttcagtacagaacacgaggctcaaactctaaaagctgcatctatgctgatattttttttaaatatgagcgcagacgatgcgagagggggcaatactgaaatcaagtagctccaattgatgtacggatgcaatcaaatgaagcgtacctctaacctgcatacaaaactcaaatgaaacaaatcaatacagtaaatttcaacaagcaatcattgaacaccagcttatcccccccggctacacgccgctacaaatgagcaatcaaaaactacttctggacgtgcgcagcctcacacgcctcccctcgctcacgcttccactctctcactcactcgaatcgcccgacgaagcacggcggcgcttcttggctggggacttgcgcagccggatcttggtctgcaggtggtcaggaatggcggtgccgttcttgtatgtggtgtgccagatctcccagcagctcatcaggacaccgtcggtggtcttcttcggcttcatgcacaggtacacttgctgagggtcgacgcaagcctcgcagtaatacgtcgtggtaccgcctcgcttcccatccgtacgcatcaaagaacagatcttgcagtttcgccgtacgcatcaaagaacagatcttgcagtttcgctggaggtgaagcatccgcggagcgtcttggtcgaagtactctggacgtcgatggcaccaagtgatactcagcttcttctgtgtcgtcatcgtcgctatccaagctagcacgacctgttgacacatgaaatggatgatgagcagatgaaatggataatgagcacaaacgttgataccagatacaatacacaaacttaccccgcggacgtttcgcaggtgtactgcgctgtcgtggggctggagttccttagcttgctgctgccgacgcaagagtcgtcaaagcagggcttgccgcatcgcttgcagcatccggaggcggagtcgccgtttcgcccgcagcgtccggaagcgaagtcgctgcttgacctgctgtttcgcggagaggtgaggcctgtgggactggcacacatgcaccatcaacctggcagtcttcttctggagctgcagcatcaccagcgttaacccattagttagataagcgcccactatgataacacaatcttgtcagcataccttttgcaacgcatgctgcactcagcgcttgagcgccttccttcgaatggactgttagcagaatcaaacagtgtgttagactgatacgccagacaatagtcaaaatagattacataccacgggcgtagtgggcgagaaccgcgttctcgcccaagaagtagtccttgccctccgtgccagccgcgctcccgcctggtgggatgaatttccaccgtgtctcgatcgagctagcggggggcagtttgtgtgtccacccactcgcttttagctccctccagatggccttccacgtcgttgtctcgccacgcaggatgcgggccgtgcgtcgcttctcgggctcctgccatttgagctcttggccgctgatttcgaaagtgagactcaaaaagagggaggcggctgctggccactcagcacgaagcctgcaagaattaattggtggtgtagcatttgtgtatagtaccctggtaatcaatattccaaaaacttgaacatagacgatggtaccttcccgcatgcatctatgcgaacagtttacagaaacactgatttcacttgacttagtctttgtatagtcagtgatagaggcaggcttacaaagagttccgagcatacaaattccaagtataacaatttcttatgctgtatttatacagcttagatttgaaatttatcctatctggatgatttgctaacacatcttatacagcgcaccgggttgaaggggttaacatagggccagatgctgctggtcttctgtgcgtgaaacagcaggagagtacagtacagaagtgctgtagtagcatcaaacatcgggtaactacatgtattacgctgaagtgaatttgacggactgcgctcaatggaaggatgtaggaccctctacacccccttgcgggtgaagtgttaaaggtcattagcgttaacaccagcactcaggttgctatttgcgcgagattctgcggtgactgtattaccataacgcaccaaggcggccgtattttatcataatacggtaagacgtccgtgttacctgatcctacgcatattgctacatctcggcacacggcagcctggactgccgcggggtacactacactacatgcgtccgtccatagcgatttgcagcttactgtgactccgctgctcattcaaagtgctctattttaccgccttcaacgcagcaaggagtctgagtccacctcttcgggaaggcaacacgaacagctctgaagtaacgaatgaagcacttgttcaacgcactcctcaaactatgtaagaacgctcttgagctaccaaaaaaatcaagagatgcaaataattgcagttaaggtacaacgccatattgtggtttttgaggaaaggttaatatttttgcccgagctcgtacatgtagccggtctcacacgtatcgactagatatgctgcacgaatcgtcaggaagcgtcgcgttgaaaatgatcctacgactattttcgccctagtcagttgaaagcactcgacctgagcaccaaagttatttatccagatgtgcctcgttgagttggtctcgtatgtagcgctgctgctgagcgcggcgctgggtgtaccggtatgcagccgacataaccgcgacaattcaaaattcaaagttatttatccaccaattgacgtgttcccgtctgtactttttgcagactcccctgtagaatgcctgcagtcctctgtacagtattcacatctcagtttctgtagatcacacacacggtttctgcaatcccatgtcgtggcgacaaaatcactacaagtcacgttgcctggtcgtgcaccagggcgcaagcgttctggacgcggtgtcttgagctttggcttgggcgggaggtatcaactgcgacgttagaagagtccaaggcgtatttcgctggtaggacggcacccacaactggcaaacgccttcagggccgagtccaagtgtgttgcgaccagtagacgtcagaccacattgatatattccgtcggatgtggtgggtactatgcagcatcggcacagtacttttgtggcagattcggaatgaagtagtgcacgaaggcacaacctgggccggtccccagcaactcaagtacatgtgggccagcataattcggcaacttcgagcggtcagtcgtcgggaacgtcaacgagccgaaacaacaacgcaaggattgcagcttcagatatggatatgccaggactgcttagtgaatatgaaggtcgaagcggcttctgaacgcccacctcctccgacgcaactgtggcaacgcaagccggagcttgaacacggtttctgtaatccaacccgctcctctgaatatatacatacgctacatcctcctcactcactgcttctgtaggggattgccaaaggagggccctcgatacaaccagggcatttgggtaaatagatgacagtaggtaacgcctcaaaataggcaactagaaaacccaaaaccagtgacccacattgacttgagtgggtcatctacaaatgacctgattcgtatgcttagggtcagcagcggttaacttatcacttataacttgtagcccgagaattaagcagtatcgggtagtgcttccgccttaacctgaattcatcgttgtttctactgttcacctattgataatggccaaaatgcacccttgaggctcagtatactcgtccgttttggcgttctcaaaatagcaaacaaagcagcactaccttcactgccttcacttccagagttggcccaagagtgcgtccgctgacgcccccccccccctcgaatctccatccttcctcagctacttcggccctactaaagtccatttaagctatcgatttggtattcgttcaacgacatgcgtccgccgggttggtatcaaaccacctcctatgcagacgcagacccacgcggtctccagcggcgtacctcttctacgggccatgtagttgaccaagccacctcctatgccggcgctgacccacgcgattctgagcaggtgatctcttctgctgcatgagtcgctgatctaggtgaggataaggcccagctccgtttcctattgctcagtcgtcagccatttttttttttcagccgcattagcgttggaacgtgaccctactgttgatctcgacctggaaggggtcgactgggaaggttatctatctctcatcgattccgaagagattgaatccgtggcgaaccacagcgacatatctgacggctacgtgaacgatgaaaatgacaatggaattgaagaattcgcaagtcgtgacagttcgatttgttcagacttcgggatatcaagatctgaaagagatttattgctgtttgagtacgacttctctgatttcagtttggattattattctggcgattctgatagctcggatattgactctgatgactcagacaacttggaatgggtacaggagacaatattcactcctgtttgcgaacattacttggaagaggaagaaaaatcgccgtatccagttcgggaggatagtctacgttgtgtcgtggacgtcgcaggcgcaaacgtatgtactgcttggaatcaagtacagctcatcctccgaaactccaccagaggctgtatttgataagcatgacgaggcggataaagcggttcatgattggactttacggcatggatttaacgtttttcggcgccgggtacggtatcttatagggtctacaacgattatttgggctcggaactacgaatgtgatcgcgctcgtaagcctaaatgcactcagcatctcacggaaagtgaacggcaacgtgaaatgcgaggttcaaaacgcagcctgatgcgtctaaaaatttgtgcagtctctaaatccaacgttcatggtccttatttgttcacacaagtcgaaagagtgctgttcacaatcatccaccggcggaagatattgtggtacacgctgcgcatcgacggcgggcagaaaatggtctttctgtagctcaagccactagtatgcaggacttcatagagggccaaactgcagctggcatacccgtggcgaagattcgagcttctatattgcacaacgattcacgatctctcgttctcccaaaggacatcagcaacgccaactagagggcacgtcatgtagcaatgtcaacgatgacccccatggaagctctgttagcgttattggatgctcacaattttatctaccgctacgaattggatccagtgtctaacgaacagttgtatctcttgtgggcacacccggctactctgcgtctttacgtcagtcattgtgatgtattgataatggatggcacgttcaaaaccaacaagtacgatttaccacatgtaaatgtcatatctatgtctggtatgaacacagtactgcctgtagcgcagtgcttcctccctggtcagaaggaggtaaattttagctggtttctcaagacgcttcgttctatgcttgaagagctcggtgtacccctacctcacgtgatactgacggatcgcgaattggcatgtttgaatgctctcgccatttttttatcctcagttccgaccatgatttgccgttggcacttcaacaggaatgtgctagcaaaaacccgaagtgttttggggcagattgccgttctcattcctctccctggccgggataaatacgaaaacacgtggcagactcaagccttcatgggttatttctacaagactgtggaatcggaaaccgaacaagaatttgagtttcgtcgagaccatttgcacttactctcaccggtgattgcttcgtacctggatgaacattggtggaaacataaagccaaactcgttcattgctggacaaaccgctaccgtcactacggctatcgtgaaccttcggtagtggaaggaacgcatgcgcgtctttagaagactattaccgtggtgggtttcgtgtgccagtgctgtgagcgaacgtgcggctcgtgatgctacgatactgccgtatctacttcagcatgacagatacacacaggtgtcgcgtgtgattactgtttgggctcttcgtgctactcacagtctctggaaagaggccatggacatcataaatggagctaaaccgtatcgagcttgctctggaatttttcgcactgtttatggtcggccgtgtgttcatgaactcatcgctatgcttaaatccaatggatcttctaggcttctaccgagtcattttgacgctcactggtggatttatcgcaatcgtatccagacttggtgaccaaggattcgggaaccagccagcttaggaaaatgccgccgcgtcgcgcgatctcacaaggttaattacggcgcctcaggtactgcacgtcatgcgtacatctggaatcagagctgagtcatgttgtatcggtaggaaaccccagggagatcaagatccaaatagcagtgaagtcggatgttgacgcagtcgtaggaaacaccgcagtgagcgagatcacctctgcaaatgaccaagtctcctttgtttagcgatacaatcttctcagtttcctttcgtggtcggcggttattccatccgtaagtcgcgagtctggttccattctgcaaagcgattagaacaaacgcgggcagttcttcatcgtcagcatcaacggtttcgctgtttagaaaacccctatggacttgctgctgagggccacccgggaaagacttcagaaacacccacgagccaggacgaatgacccagtgttcgttgtatgcggaggcacagccattcacagcggtctcgaatggcaccaacggattatcggattcttcccactgcgggacgtacgcctgcaacctgaactcgtcttgttcggcccccacgctgaaaacagtcgcccactgctcgatgtcattggcctttagtcgaatcgctgcggcctgtgcttccgtaaacgccttcttgataacctggaacccgtcttcatagcgatttatgttgtgcgtgtggcgaggttgcttgtttttattaaatgaagcactctatgaaatagcgagtcatgtgaccgggtacgtcctaactcgccaaagatactacctcgcaatcttatgcgaattcctaatatcttaacacgcaatggaaccttataccaatgatagaaaggcagaataaaacagaatatgtgcgcgttgggggtgctcagaacggatatgagcagataagtcttgcctacgaggatcacaaacgctatttcaagggcccattcctcagcagtagctcctgtgcgtagtcgaaagggtcgttgccacggcaggactctaccccacggctcgcggcatgatagtgtagagccggtccacacctccgtttccgctgtgtcctctacggtcttcttcgaggcctgctccgccgtctcttccgctgtctactccgtggtcttctccgtggtctcctccggggtctcctccatggccgccttcgctgtcttctccgccgtttactacatggtcttctccgtagtcttctccgtggccgcctccgctgtctactccacggtgtcctccaaggtcccctccgaagcccccccccccccgaaggctcctccgaggtctcctctgtggctgcaacgagtgccatggcaaatgttccctgtgataacttgagttgctgctttgggcttaatgagcagtgtctgcagcgtcttcagctctagcgtgccgtcgcctgtgaccctctcgagctaatgcgggtcactggttttgggttttctagttgcccatttcaaagcgttacctactgtcatctatttacccaaatgccctggttgtaacgagggccctcccgatgagggccctccttagcgatcccccttctgtactggtgtatatcttcccgatgattcccataaatcagtgattttcactgagatttgacaaaatgattgtgacagtttgcctgaattcactgacgcaggtatagtagtatagtactggcacgtccataccattttcaagtcaaatttggaactatagtaatactacaaatagtacacgtaggtagcgtgttacctacaaaaatactatataaaatagtagtgcttggtggttatacttgttgcactatacaacttatctgtaattctgcactaatattgaagcaactttattcgttggtcgtcttgaggattcaacaaaatacaagggactaagcttctccactagtgcgagtggagacattggggctggcttacttcaaactgggtggttcgagtacagaaaaatcccgtttttcctacttgcagactcggagtatgctaactacaagcacattgtgacaacgtatgagatagcggagacccagagaagtgtggtaattagcaaactaaaccggaagctcgctggaatgcgctactgtgtcgagtgtgcatttggtgttgcaaagatgcgatggcggcttctatcgaagcctatcaagatagcgaggacaaacctgaaagacgtacccacgctagtaagttcagtgtgcattttgcataacttcgtgatcgatgagaaagatgaggtctgaaaccccgagctcgagcaaaggcaccgagagttttacttcgaaaactatctaagattaaccaacgagcaacggtgcacagagaatcaagttgaaacaagcgaaactagagatgcaattcaacactggttgcagtacagagattcagtgaggtcgtcctaggtccatgttaaaacgaagtgttaatgcgaagctattactgactagaaaatagttcgcggagcaatgagcgggtcttttcgttttcttctttctgatgttgcaggtatatttcatgatcccgttgcgcaatatcctccatggacttgatggtcttcttcatcacatcgtgcatcctctctgcaatatcttcggtccgcgtccgcttcgtgccacatgaacttggctcggatagggaactttcggcgagatgttcactcgcaccaatcgctaaaccaccatcgatgggcctgatacttggatcgccctcgaaaatctcccccagtgcttgataacaatccgccgtgagcgcgacacggccccacttttttaaaacctcggctcgctcagcgggcggcatttcaaaccacgcaggccgccctgcgctccctaccaaagtcccgttgttgtggtcagaaatcaacgagtagctcgacctcagtgaggccattttgtcgtccaccgcccgcggttgccgcggccagaaatccggatccgtaaccgcgataccgccttcaggcttaggaggcgcttttgccatactcgctaaaaacgagcttgcatcttctacatgctctccgagcagctctgcctttgtcaaaagcaagcgggagatgtatgcgttgaatacagtcgtagcaacatgcttggcagtggacccttctggtaaatcatcaacagaggcggccttccacgcaccgatgagcagtagaatctcttctcttccccacacctttccccgcgtatgacgctttgtggccgcgttctttttctgtttggcaccttcgatccggccatcagcttgtatcccgctgccggaacttgagcagcagagcccgagtctttggccgcgctacagacaccaccactctctgtgctgcaatctccttcttcgctctccatggacacctgacaaacctgcgaatggtaaccaacgagtttcttgctagcctttttagaaattcggaatatttttatattaatgtgaaaatcggaatagtgtcagtgtgaacgctgatccggcttagagccggaaaactctccggaatagtgtcagtgtgaacccccccccaaaggggggggagtcacactgatggactccggttggagtccaagtcaagcaatctttgcttggggaagcaagcaatgccggaacccgcgaaggcgaatggtgaagactggagtgtttaacgtatcgactgcatcgtgttttcataggtttcgttttcataggattattctgcgtttgacatacacggtattagagtcagctcgtatgaaagtcctgccacaagacttgggaggagtccttcgtaacacctcaaaccccgaatgccgtgaaaatgggcgacattcgggctttcggctgtttgtaggacctgcgcaagtgctctcatcggactagcaattcttggtcctaattcactacgaggtatctgctccgataacctagccccatcttagtaggtagctgttttacacgtccgatttgccaaaacaactgaaaagcacaatacacgggtagattatttaccgggttggatacaggtcgggcctgaatttccggtcaggtttttcaatacaactataaagacgtttcctggccacttccagctgcgacatcacgggcgagggcgagcagcgcgagactcaccaagtgcattcacgcattgccaagacccgccgatcaggcgggggcgtgtctgcgcgagcgagcgaacgcgagcgctgcaacccgatattttttttctagacacagcgcctgaccgagtcgaggacttcgactatgggggtggggcaggccgcgcagcggccccccccccccgtgtcgaagtccgcagacgagagccaacgcgctagtgtcctacccaaggtacgttatccctcctgaaatgcccgaccaaaaggccaggtctgacccgtatccgtaccgataaatagataacctgtacgcgtacatgcttcacagtttgtaaattctcgagccgaaacctagctaccactaacgtgagctgaagagcactccagccatgtttcttcgcttcttcatagtgctcgctgccgatgccatcatttcaagcgtcaataccgctctggggtctccgaacgctacagtactctccaccctctccccagcagcagcacctcgtttgacttctggtagtcggcagaacgacgacacctcgtcgcagttcatgacagccaacgatacaacggacgtacacaccgaagagagattggggccatcagcttctcttgttcagaaggcaaagagcttgctcgtcgacgacgttttccagaaactgagtgtttttcctgcgaaggacagactcttcgaaagcccgcagcttgtttggtgggtccgttacgcagatgagttcagcaaaaagaacccggaccaccccagtcaactgatgccgaccttgtgaggcactacactgacgaagggctgctggacatgatcgaaacggcgatgaagaatccaagtactgcgacaatcgccaagaaactgcagacggagtgcgtgaaatgggcgctcccaagtcggcttcccccagggagcacgttctaaagcctggtgatgaacagggctgcgatgaaggacaagtatcgaacggtgtggacttcgaacaatgcttttgctgagcagaaaataagcaaggcgacggacaaccttctcaccagcggtcatttccaactctggagaaagtacctcgaccgatttaaccagatgcaccccaaacagaaaaccactgtcatcgacatcctgctgggctactacacggacgaagcgctggctcaaatgctgagcttggcgaagaagaacccgagtacggagaaggtggcggcgaacttgcagctcgcactgctcaacatgtgaatgcgtgagctgaaagacccgacagaagtctccaagctgctgaacgcgggtacgtctgatgcgctcttgcaaacgtacgtcagcaagtacaactgggcggtgaacagcgcggggataaactctttcgacaagccgcagctagaaacgtggctcgagtacgtcgacttcttcaagacgaagcaccctggaacgcaagagtcgacgaacacgatcttgacagcacgctatggagacgaagctctggcgaagatgattattgagttaaaggcgaaacccgacacagcgaaactcgcaaaagaaatggaaacggagctgatgaaagggtggatgagcagtcagacgtcaccccatctcctgttcgagttgctggatttgaaaggggcaggcgacgatctcttagcggatccactttttagcatttgggtctcctaccagacgcgtttcggcggaaagaacccgcagcagaagacatctttgtttgaggcattgatggaggaattcgacgatgatgctctcaccaagattatcatcgtcggcaagagttactcgaaaacatcgcaaagagccaaggcactaaagaagacccaactttcgaagtggctggaagaaaaacaagctccgaacactgtatacaagtggctgaaggtaaagggaacagcggcaaacagtgtggaaagactgagttaccttaagtactggaaggactacaaagcgaagcatggatagaggagactaggcttatgagttctgtagtgtttaacacaatgaaatacagaaattcggaaagctttttatgcgttgatgtaaatctcccaaaagcctgctgttcgacgctcggtgctcttaatattcaacgcagccgagtgatttttgttgttgtttttttgctgcagaggtgtattcacttagttaaaataaacttacgaatcctaaattaccttgaagttggggtacttgggaaatgaccattaacgccgtgtgtacacttcggagctttttttcagccacttattttctgctaaaggctgactcttgggaaagcatgcaattacatcggctgaagtaaatgagcgtagggaggaggggtgtgtgaaacaaacaaaaatcgataggtatgctacaagttaaacgcttccctctgcagtgtccggagcgcgtacgcaacttttaatgctggcggccgatctcgtggttcttgagccatacactgcttcgccagctccagcacaatcggtggacaagtatcgctaaatgttggccgaagactgccgctagccaccttctgcaagatagccaagtcgtcgagttggttaccatcgttatccgatgcatcatcgtacggatgatcgtgcgtgtcgaattccgagaggagtacaccaaacgcgaaaatatccgcaggctggctgtaatcgcttctgcccgatatcacttcaggtgcgagccaccgatgcatcccaaccccagatctgcagtttggcaggatccgtgtgaccccaatgtcggtgagcttagcttgcatttccgcggatatcaacacattgcgtgactttaaatttcggagcaccaccggtggggtgaaggtatgaaggtacacgatcgcttcgatcacgtccactgcaagctgcaccttggtccgagtccaataacgcgacagcgagggtgctgatagatacgatcgcaggtcgccattctcgacgaattcaaacaacgcttgcatgtcgaaccctgagctggctgcaccaatgaactcgacgatgttcgggtgatcgagcttggaagccagcttaatctcctccaagaatgtctgcgtgtgctccgtgatatcggcatcttcacggatgcgtttcgaggcgagcagcactgattcgcggtacctgacgagccaaacaacgctgaaagctccagttccgataagtcggagatcctggatatcgtcgcaatttacttgaagcgctaggagctcgccgtcctccccgaacgagcgctgtttagtcgattttctttgcagcaatcctctcgagctcttggtcttgtgttgcctccagtggtaagtgatggtagcaatgagagtaccgaggacaatgaagcccacagcgattatgaccatgaccagtggtttggattcgtctgcgctgctgctggaccggtcactctccaggcttgttgatcctgatgagtacgaaattctggaagttgggagactgccggatgatgccaatgaagcgacgaagacggatccatgtctgcggtggagacgcaaaggacgattttgttgtcgccaacaaccctatgctctgatgagctgcagttcacaggatcctggaagtcgctatcctgcaagtccaaacttgcgagtgcttgaaggaaagtaatctgtgattctgtgaacgttcggctcgacagcgggttgttctggatcgcgagcttagtcagatgctggaaagtgaagataactgctgggatctctgtcaggttgttgctgttcagatagtcaacaaacaagcctcatcagcgacgtacacacataaagaatattctcaaacttacagttccgtcaaactggggaaattgccttcgaatgtagacacgttgttctggtacagatccctacaaacaaacaggtaagacgtcaattctccactcaggtacgaaaaagcatccacagcgatcgtacagcagagtgagtttctcccatgtaatagaagcgttcacagtggagatgtagttgtcggctaggtgcagagtggccaagttcccgagggactccagtagagaaggaaactccgacagaagtgtgttcgagagcgacagtgcattgatcgagctcggaaccatagtggggatgtcgtaaattctgctcgaaaggtccatggacaccagacccaccgacgtcacttgtgactgattggtgagcaagttgtccgcgagatatagctcgacgactttccctttggtggtctgctggtagttgttgccgccctgaacccacacggtagttgtctgagctgatagcgcgagctggtcgaccgcggtaaccacgtcgttgtttgcactggcgtaaatggtgtcattacccccatcttgcgcatcgtacggcacgaggaagataaattctgtcgggttggagttgtaggcaccaaaagcttgaaagcacgtgtacccacacgcgtcgtcgaagtcgccagtgcaaatgacatctgaagtagaactcgagtttgcgcactccgtcgcgttgtaaaccagacaaggctcgtacgccccgcaagtatcgttgcatgctgtggtcaaggtgttggctgcagcgaagcattcttgagcgtcgatactgcacagagtggacgaaacaagggaaacgaccaggaattgagtcgacattgagcagcaaattcgtattgcaactgccccaagggagaaggaaaatgagtgactagttgtgcacacacactaggcaataaatatcctggtcacttcggaggtcttggtactggtggatcgatcaacgcattccgatgcaacttcctggcctgatagtagaatggctgtctaggttcatgtacaacgcggaaccccctcattgcttcgatgctgtataaggaacatccaactcgttccgccgacttccactcgcactgcagttttatctaaagctttgccaaaccagcgtcaaagttgagattcgaggaacatcaagttgtgtacatcctccgctattgtattcccatggggtgtccttcgcctctatcaatgagactgtgctctactccttcccggtctcaatcagcgctggggtctgtgtctgtgtcttggatccagccgccgagatcttcgtcacggcgtagtcgatggcgaggcctacagcgccccacttgacggggcggaaccaagtgcgcacgcgacgccagcgacccaccagcgggtacaccgagttgagcgtcgtgccgtacactgcgaacgccatcggcgcgagcttggcgtcacgcgcgacctggctcgagttgtcatccttgccgtcgttcaggtacgacgcgccccagatcaggagctcggcgcccgtgacaccgagcaccaacgggtagaccatcgtcttggggagcttctcggccgtcttcttggtcaggtacgcgatgcctttggcgcgcttgtgcgagctcacggccttggcgaactgcagaccgccggccatgacggagaagcccgcgtagttcttcgagtcgtggttcaggaagcgccgccagcggtgctgggcgtgcgcggcgtggtcgaaggccttggctgccgacatgatggcgatcttctgcaatgcgctcgagcgagtcagcggaataggttgttgagccccgctgttttcgctgatatccccgatctgacgagttttgtggggcccgcacgcacgatggcacgctgtgaatgatttgctcctttgcatcacaaattaggaatggaagcgcaagtggagccgcaagcacatgaggcgctggcgttctaaacgtcatgagctttcgctatatttttcacataatgtaccggtcaattcagctatctacacgtggaggatggcgagctagacgctgctctttgtttgctccgtctcgtcgaatcgaaatacccggatgataatgggtaagcaagcggccagatcacgacgcgattcaatactcgcgcgcgctgacggcgagcggctcgagttccaagtgagtcgcggcctggtagtggcgtagcagcgccatctcctcctcgtgctcgcgccgagcctcctcgaacttcatgcggtggtagatgccgaacacgtagtctgcgctgtagcccagcgcagcgagggccaccgcgcccttggccattgcgcgcgggcctcggtgcacgttgagcagcgcgccgcacacggggaaggccatgagcacgttgtcgcgcgagaagtcctggcggtagtgcgacacggcggcgatcgagagcttcatgccggccatgccgacagcggcggagcacacgagcagcggcaccttggggcctgtgcggcgcgcagcgagcgccagtcgctgagctgcaggcagcagcttgtcctgcacgccgcggaactccttgcccacttggaacgccgtgaacagcgccgagcacgtcacgaaggtgctgaggtcctcctcggcgaagcgcgcccaccgctgctgcagagttggctccatggcttcaagtctgacgtacgctgtaacgcagagggagcttgtctttgccgcgccgctgttaaacgggaaatgaattgcactctgcggccatggtcaagctcggagcctgtggtggatgaagcgcatccccccctatttttaacattcatgtgtgccacatcgatctctcatttggtacaatgtaccactacccgaactttagtgtctttagccaagcaaacgtacccacatccacatccgcaccaccgatttaacagataccatcattcctggcgcaagtcgcgcagtgcccttcctgctcgccatggagccgcgtcctcccgcttctcccggcatcgcagcgctgcgcaatgctctcgaagacaagagccgtatgccagtaggagccgacgccgccatcgacgcgttcctggccaagacgcagaagctgcagcgccgcgacggccgctcgggcgcatcgggcttcgagcgcgagtacatggagctgtgctggagcatcgacaaggcgccgggctacgaggcgtcgctcacgctgcagaccaaggccaccaagcccaagaaccggtaccgggacgtgctgccttacgaggccacgagggtcaagctgcagaacgctgcgaagcccgcggacgactacatcaacgccaactacatcgacggaggctacatcgcctgctgcgcgccggtgcccgccgccatccgggacttctggcacatggtgtggcagtgcgacgtgcacgtggtgctcatgctcaccaactttgtggagcgggagagactcaaagccgacctgtactgggaccctcacgcccaagcggtggactttgacggcgtcaaggtgaagctggtggacgagcagcagccggagaatctcggctttagtgtgaggaaactgcaggtgtggaaggaaggcacggagacccgagtgattcagcacatccagctcacgacgtggcccgaccatggagtgctgcgcgacttccgggtcattgctccgatgctggacgctgtcaacagctatcgtagtgaggcgtcgaggacgcacggggtggacgcgagggttgtcgtgcactgcagcgccggcattggacgctccggcacgttcatcgccatcgatatcttgttgaagcagctgtaccaggtgctgaccagtagaagtggtgacgccaaggagaacgcccgagcgatggagcacgcggtcgacatttctcgtgtggtacaccgcctgaggtcgcagcggcctggtatggtgcaaaccccggtgcgttcttgtcaatatgtgctgcatatgaaaggttgaactgacgaagtggtgtatattgtggctatgcaggagcaatacgaaatgatttaccaatatttagcagccgtggttagcgacaaccagccatggtgacggagacggtcagaatcgttataaaccggtgcgaaggttatcccgttcgtattcgaaggcaatgtacagtgtgctgcggcatcgccttaaccacgaataccaaacccatccgtttttattagtacacggggccatgattcacaattcggttcacgctgtggcaacaattgcagtccgagttgctgaaccgaagcgacgtttcgtgcacacacagcaagctctttttttttaatgatgtgtctcttgtcgacgactccaggggagttgtgctgccgtcgcaatgaagcgaggcgcccggatgtcacgattatggcgcacagctcgcaggagacgttggtgtctccgcagggggagtatcttccgtgcgtcttggaagcggccgtgccagtcccggccgctgagggttatatggacgctcttcaacggtgctcggctcttctccaattaaacgtggtgcaacgcatcctgtcggcaattatcctggctccgctcgtgacggccttcctgtgcatttcgccagccttcgcaacgtcgaccgtctgcagcttcgtggcgagcgcgtgctcctacgagtatgcgtgtctctcaaatcgtatccggctgagaattctcacgcgacttgaagctctcgagggcattctggatgaagatgacgctgattcgcgctggagcaacgagattcgcaatcgcagcagcttcgtatccagtcatacggctgaggaagatgccatgagtgaagggaacttcctgtcatcatcactcgtgagtgaatgcagcaacagcattgtttcgtacgcagggttgcggccgtcacagacggatcttcgctcgcgccaagaagagcaagaggaagaagatatcgcgcgtgtggatgctgagttgcgggctcaagaacctcggctacgatgccatgcagtgagtcacctggcaggctgctacttttacgggaacgacaagctggctgcggcgtgtctctctgtggtggtttgtgctttgtcatcgaccttgtttctgctgtccgtcgagcatgctcagacgcttcagacgacggaattctacgagtctcggtggtactattccatcgccacaagctatgttgcgggcttctgtgcgtgcatggctccggactggtcgtatgcgctcacggttcttgtgcaatatggcgtcttcactgttctcgcgatgtactcgacggggtgtccgctcaacgatttcagctgtggaatcggacttgatcccgaggtggccctcctcgttggtatgttggtactactgttatgccgctccgctgcctgtcgaacccgagtcgaggcgttcctctcgttcatgctagacgtgctgggtctgttctacatcgctggcaccctgtccatcctcgtggcttttgtagatgacgagcgccgcttgctgtatcgcgagctgcttattgcgttgctatacatcgtatgggcctcggacactggcgcttatgttaccggcaaagcgctggaactcgcaaactatccctactacaacccgcttgcagctcatttgtcaaagaacaaggactacgagggaactgttggtgccatagtcttcggcgccggcgccatggttgtggtttctcaagtgctggatctacctgggtcattcgccttaaaaactgcgttcaccgtgctggctgtagttattggacgtcttggagatctgttcgaaagtctattaaaacgcgcggcgggggtgaaggactctggaaagctgattcctggtcatggcggcatgctggaccgcatcgatgcacttatgtttgcgactctagttttctcacgctactacgccatggaaacctagtttttttcaacgcttcattaaaataaatgcatgtcgagctagtacatgtacaactaaatcctagtttgaatcatcaattgtgcgcacgatttcaggctcgttgcggattatactgatcgccactataccacttgcagttggagtaagacaaaaggtgaaagagaagaatctaggcctcggttgagaatacacacacgaccaacaaggtggcttttgccgcccagctgagtgttgtcgttgcttccatctctgcgtgagcagcaccaagaggacactccacttcaggttatgagcccaaggctcacgcgtggggagcacagcaactaggacgtcatggcggatcagaagaagacgcccaaggagtcacacgaggagaagaggacgattccgccgtttgacggcaaggactacgaggtctggcacgagcgagtcaagctcaagctggagaggaagaagctgtggaagtactgcatggaggacttgctcgagccggacgagagcaaggaggcagaggggcacgcgacgtggacgagcgagatggcccacgccaaggagatcatctacgacgcaatgacgaatcacataatgaagactgtgaagtacagacaacgacttacaaagccggcatgcttaatgccatcctcctatataaaaacaacgataaattccctcccgtcaaatctgtaaaactgtcataaaacacacggtgtgttgcataaagtacacaataaagcatataaagtacacaaaacagatggtatacaaagatgaagtcatttgattgaatctgattggctggtttgctcatgttaagctttgcttgacttcgtctgccggctttttgtgtcttccggctttgtaagtcgttgtctgtatgaatccaccccgtttcgtgtcatggagcgcctgaaaaagagatttatgggcaagacgtacctgaagtacgctgaggagagggccaagctcagtcggctacggctcgctcccaacggcaatgtgccagatcacgtgagcgagatgcgtcggctgatggagaccattgctggagtcgggcgtcctgtggacgagtaggtaaagccagcactattgattggatccctgccgcgcgaatatgatcatgttgtacagacgtttctcgccagtcacaagccccaaaatgctgatgatccttctaattatgaacaacttgaactcgcattggagatggcttacgaccatcgccaaggtcggaaagcagagggcgccaaggacaatgatgatgaagaaaaggcgttctttgctggtggaggaagaggttgaggacgtggtcgcggccgtggacgtggtggtcgatctggaggacacgggcgcggatccggtggtggacgtggttctggcggtcgcgggagccaaggtggtggacgtggaactggacgtggccaagccggcagtggacaaaagccaggtggtgcttgttatcactgccatgaagcagggcatcatgtgtttgattgcccgtttcttggcaagcgacctccagccgaggatcgcagcagcacccgagctcagaagcgcgtgaagatgagtggagggaagagtgctaaggctgctgaaacgagtagctacgctaatgaaagtgatgacagcgcgtatgttattcttcaagtgatgaaaatgaaaaagccggtcgcagacaaagcccatgataactggtacctggactctggtgcatcgagtcatatttcgaaccagctcactgatttcatggagttcacgcctcttagcgcccggattcgagttggaggaaagaactcgctgggtgttgacggtattggtactgtggttaaagagctggagactactggtgggaggtgctcactgacgctgcgaggagttcgttatgctccagagctgcagtgcagtctctattctgtgcgacggcaactgaaccaatatctgcctgaacgtgatcgtgtgaaggtacactttgatgaggcagatcgcgcgtatgttatcttacaggctggtgtgactaccgctcaagttgattataccaatctctatcgcttgaagttggagagaccccaagaggtagccatggtggcgctaccagctcgagtgagtagtttggagctgtggcattcgagattggggcaccctggcaagaacgcgtttaatgcgctgttcagccatgatcagtggccgttgccacatgtgaacttgcgtatcctggtgggtttcaattgcgagacctgtgtgacggggaaacttacgaggaagagcatgaagaagtctcggacacagacccgcgagtggttagttggcgaaaaggtccatatggacgcttggggtccgtatgcagagcactcctacggtggtaaacggtactttgccgtgttcgttgatgatgcgagtcggtttgtcaccgtgaatcttctggagcatcgttcggaagtgtaccagaagtttgaggagcactatcaacgcgtcaagacgcagcatcatgtcagaatgaaagcgctaaggtcagacaatgcaaaggagttcaagaagctgcaaagtacgtgtgacacgaagtatggtatggagtttgacagcagcatcaagcatactccggagcaaaatggtgtcgcggagagaatggtccgcaccattacggagagaatgcgatgcatgctcgtgcacttcgacctgcctgaagcgatgtggggtgaggcagcgatgacagctgcatactccgtgaacattatgccaagctcggttcgaggcatggaggtaccgtatgcagtatggcaccgtcagactcctgcttatgagaagttgcggacgtttggctgcgccgtcctgtcgtacatcgacaaggtggagagacggaagatgcaggcgaaagtacgggaggcggtcttcgttggatattcgcgagagaagcgaggctatcgcttgctcgatagcaagaccaacaaggccttctacagccatactgtcgtgttctatgagaataaagctggtcgattgctcatggactcggcatcaacgccaagtgcagcctccggtaaggaatatttaggcgttgatcgatcacattgagccaatgctggatgaaatgcatgatgactcaaatgatggaggtagttatcgtgatgatggagattgctggactggtggggccagcgactctagagacggaggtgattatcggactggtggggctgatgacacccgatgtgatgaccgaccaggtggggcagttgagcaagatgtccggtcagatggggcatgtgggtccaagaagagaggccccggtggtgatgccgcagcgcctcgaccaaagagagtgcggtttgcggtgtttgaaagtggacgttctagcaaggtggcagaacgagatgaaggacgtggagtgagctctacagcatctggatgtgatcgttctagcaaggtggcagaacgtgatgaggaacgtgtcaatggacatgaggcagaccacctgcgaggtgagtgcgtgccaggcaattccaaaagaaggagaaagaggaaatgcagcagtgggcggcacaagggaccggctgctgacaagacgagggctctaccagggagtcaagaggtggaagaggtggacggcaggtcatcggctgctgagcaggccgactcggcagccaagtgtcgagtgatgctgcgagtgtggggcgtatatcaacgcctccttgcacagcacttcgtgagtacacaggcccgagaggcactagccataaagaccctccagtgacacggagcggtcgggtaagtaaaccgcccacgtggttcggtgactacgtctacattgcctacgaaaatacaaatccagatgatgatgtgaactcgttggctgctggatggaggaaagcacgagctaagttgcaacgtgctatggcgaacgagttgatccttgcatggtgggatgactattgctgcatgagtactggcgagtttgaagagccagatacttacggtgacgctatggagagtgagcactcattgcaatggaaaaatgcaggtgatgatgagtttgattcgttgatgaagaacgatacctgggagttggtgccgcgtgagaagcacatgaaagtgctgcagaatcgctggatctttcgcgtcaagtatctagcgaacggagagatcgaaagattcaaagcgaggctcgtgatcaagggcttcatgcagatttatggtatcgactacctagaggtgtactcacctgttgtgaggctggagacactgcgtgttctcttgacactggcggctgtctgggattatgaagtgcatcagatggatgtcactactgctttcttgaatggggcgattgacgtggaggtctatatggagcagcctgaaggctacaaagtgaaaggcaaagaggactgggtgtgcagattgaagaagagcctgtacggcttgaagcaggcgcccagagtgtggtttcagctgctcaagtcgttcttggatgagcagggcttcacgatgctgcagtcggaggcctgcgtggctgttaaagtaattgatgggcagttggccttcatccctctctatgttgatgatctgattttgtttgctccgtcgatggagcacatcaacaagatgaagaagatgttcgaggaccggtttgcgatgaaagatctcggggagttacactacattctaggctgggagatcacgcggaaccaggccgagagaacgatgttcattggtcagcagaagtatgccgagaccgtgctcaagcggttcaacatgcaggactgcaatggctacaagacgccgagcacggcggatctgaagctgagcaaggccatgtgtccgaccgaaaacgatgaaaggcaactgatgagatcgaagccatatcgtgctgtggttggcagcctgatgtacctgatgctcggtacccggcccgatctggcctacctagttagagagtgcagtcggttcttggaaaacccaggtctgttgcattggagagctgcgaaacgtggattgcgctacctgaaagacacagcggactggggggtccagcttggtggcgtagcgtggtcagatcaaaagctggatgatcatctgagagcatacgcagatgcggattttgcaaatcaagttgatgatcgaaagtctgttgcaggctacgtgactcaattttgtgggagcatcatttcgtggagcagccagacggagaagaccgtcgcgctgcacacgaccgaggccgaatatatggctattagtctactggtgcaggaggtggtgcacttgcgccaaatgctgaaggagctgcaggtgcagcaaattcagccatcccaagtctttgttgacaacgaaagtgcaaagaagcttgccagcaaccctgtgtttcattctcggaccaagcacatcgatgtgcgacaccacttcgtgcgtgagcgcatcgatttagaggaaattgacgtgcttcgggtgccaggagttgataacgtggccgatgcttttacaaagccattggcacgtccggcatttgaaaaacacagagctgcaatgggattattgccaagggcaagatttagagatgcaagttgatgggaatccgtaggtggggctgttgcggattatactgatccccactataccacttgcagttggagtaagacaaaaggtgaaagagaagaatctaggcctcggttgagaatatacacacgaccaacaaggtggcttttgccgcccagctgagtgttgtcgttgcttccatctctgcgtgagcagcaccaagaggacactccacttcaagattcatccgtgccaaagttccctgtctcccatggagcgtgttatcggtctgctggtggtagaccgtatcgccggtcgtttcgcctcgctgtgtgccagccccagatctccttcacttacagctctcgccccacttcgcttccggccgacaactcgtggccgcgaagctggcagcttttctactggtgcaggctccattttcgctactcgttcctccaatgttgccatactcgagtctgcatctctgggcggagaccccacctcaagcaaaacaagttggcggagtcctgccttcgatgcactcactgcagacggatcgagggcttcacgcagcagcccaatatccccgacccacgacagagtctgctttactcgactcagcaacctctcaggggcaacggcagcaaggagaaactctttctgagcaacgtcgctctccaacttttgaacttggtccacaacaccctggcgcgatcgatacttgcgctccatagccagccacgcttccaatacactgccatttgttgctcccgactgatctatcgtacccgtcagaggagttactgcttgttcgtgttctgctctctcctggagcgtcatgaacctgcccgtgctcgcctcacccatgccgtgctccctgggcgactcagacgcgccggatagctcgggtccactgctcaaagcctccagtagcaacgaaacatcaccggaacaactcagctcttgcagcactctgtcgtaataggatcgaggagtcgacgcctccagttgcgcgtccagttgagcccacttattctccaaagcccccacttgcgccgccagccattcataggtagagtccagccgctcaatgtcgtcacgcagcctcaccaccatccgacttaaactcccgcactccattcttctccaccattcgacttaaatagcggaataggatatgtgtgcatttcaagtcccgctcctgcgagcggtagcaagacgacttacgtgggggatgcagcgcgggtctgcctcctccctagcaataacggactcatcctcttggccagcggcctcagacccaccgtgaggacggttatgtgcaccgctccctcgaagggagggcttcttcccgtccgcgttgtttcttcttccttcgtcattgccgtacgaactctgcggggcgcggtaaaccttgcagtcgcgccataagcagggtttgcatgttgacggcggcgttgacgtctctgttcagaaagtttttcttgcagttcttgttggcacaacgcaatacggaacgatcgtagtagagaggtctttcgtcggcgtctagctcgtcggggccgggatcgtttggatcgaggaagacggccatcttcataggttggtagcaggcggagcacagtttgctcgtcctgaactcgtgcaccttgaccactgtcgctctcttcctcatagccttctcgagaggtctcaacggggggttttggccctcctttgatgttgtcgctctggctccagttgccaagtccgacgcacacatgtgccccggcctctggtatcagccatttggcgacgtcgtctacagcgatccggtgcttcacatgcgagaaaaatctccatttcctgaaattgtgggcgatgccgaaatccaggaaatagtccaggctgagccatacctgctccatccgaacgaggaaaactctcgcgtcggccgttttgaggcagggaaggctactgattgcgatctggtattcaggaaatcggaggcgcagcttctcgtgccacttgttgaatttcttactgccactcatgtgctggtattcgcctgccttgatctggagaattcgctgttcatgctggacctttggtagtttcggttcgcgacgtcttcgaactggagttcgtggaggtcccgttgagctcacgcggtcttccactgggcacctcttgttgcggtgccatcgtggaggtttgggtgatgggggtggagggggtgggggcttcttcttctttgagcaaagcttgccgatgatcgcagccgtgcagggggccttcttgcctggatcgacacccacaaacccgcgagcgcggattccccggagggctggctcgggggcggggtagggagccgagtcgctgacttcactcgctatactgggatcctgctcgtgtgtagtgtcttcctcgggttccaattcaggctcgtcctccgttatttcctcgccgttcgtctccgtcacgagcgattccgaatccgggtcgtcatcaaactcgtccgcgtccccaagttcttcatcttcctcgttttcctctcttctcccaacggagcgtgccaaacgcgtgagctgcaccattaacacggaagctgcgtacccatctgaccggatcgagtcaccgaagaacctagcggcgtgtcttgccttctcgtccaccgaaagaccattgaagcgggccttgccgatcttggtgcgccgcgtctcgaactgtgtgatgttgaatgcgcgcctcatcaactcggagccccgctgagtaaagtaagggcgtgtcgggatgcggttgttgggcgtgagttcaacaccaagaacattctcgcccgtgcgcttgtaaatgcgcgagcagaggtgtgccaaagtagacggatcgatcttgatgttgtagagtgcgaacgattgcgatagcggtagaaggctgaacatcttgattgtcttagagcgcttctccttgggtttcttagcgcccttgcccttcttcgtcctcttttcctcttccatttcctgaatcgtttcttctgagccgtcgctgtatctccactttgcgcacgctgccgccgctgctcgatctggttttgctcaacaaagaccatgatctcgtacagcttccgcacgaaatagcccacatgcttcttgataacggttttcctggggaaaacctgctccagctcaccgtcttcaccccacgccgcagatcccagccacgccttcatctccagtacttcccggcgctccgacgcatccgagctgtagcaggcgcgcacgacctttctggtttccttggcagagatcccataccaaagccgcacaaagagggtgaagtgcttgcggaactgggtcacgaccatgttggtagcgttgacgctcatgagcccgccagcctcaccgtgtagaacgtcaatcttggtgacgtcgtctggctcgtaggtgtatgtgcttggtcttgccccgaggaacgctactgcggagtcgtaaaggtcccctagacgaacgtcgtctcctcggcgaaggccccggctgacgattctacagcaccgggtgaaaatgtggaagacgtcaagtcggggatgtcaccgcgctcctcgcactggcggagtacgtggaagttcgcgagggcccaagcttcggtggtggacttcagtatgagtcgagcgcaaatctggatctcattgatgagctccgggtggggacatacccgaccgagcttacaccggaccgtggagcaggcataccgccgcttccagtctcggagcctgccgggagggcggcaggcagcacgctccatggcgctcggggccaattcagatgtgcggggcggagacgattgaagggaaatctggaaatgccagccagcttccatggaagcataagtgcttcaatggcgtagtgggttgaggggggtagccattattcagctgagctcgtatgggaggatgtcgctgagctgctcctcgatgaactcgcggacgtgcgatgctgcccatataggtgaggagccattcggggcagttcgggccgagtacattggcagctttgtggactacgtgaacgacagcgcgcgcgaactggtggctgatgtccatggaagcacaagtgcttcaagcggttagttgtcagtatacgcggggtggctgccgttcgctggccttcgttctcctcaccatgcactccgccgcgtgcttcaagacgggaatgagctgcagtgtggcggtgtccaagcgacaaatcttcttcggtgcagttatcgttatcatcgtattctgctgctctttttcccacaatcgcgctgaaacatatgaaacaattggcgggaacccgggttcccgcaaatgataccgaccaaatcgcgaattatttatttaacctttggcctctatattggtaccctcggggcaagttaaaccctcatatctaagtgctgtcgatgaaggactaccctcaaaatatgcaacaggtactgaatagacccaaataacataccttatcatgtccaagtttatctttcatgagcaggaggatagcgatgagaccgggaagcactgtaccgctgcaccaggcaagcgactggattttcgtggagagacacaggacgagggcgaaggtaaattaaccttccgttcccctactgagcttcagctgcgttctatgtaggtcatagaccaacacttcaatgcatttgctcatacatgtgtaccggtagttttggtggaaccggggtcccgatgggtacccgggttcccgccaattgtttcatatgtgtgactaaaaagttgccagttgaagttgtctattctcacaaaacatcatacgtatctgtacaaaccgtgccatctacgccaccgacatccgatgatgcccacggctacgcacggtccagattttagtcgccactcatacagagattatcaccggagctgctcgctggggggcgcatgaccgccgacttccagaccgtcaacagcactcgttctcctccaccatggcgcccactgagtcgatattcgtgacctgcacgcccgtgcagtcgccgtacgccgacttcccgtacaccgaggagctgtccccgagtccgcggtccacgaattcgtcgcgacgaccgcgcaatggagacgcgccctcccgctgcagtcgctgcgccgagttcctgcgctgcaatgcggtgcagcgcgtgatatcagccgccgtgttggcgccggccgtgacggtgttcctctggtcgtcgccggctttcgctactacgacggtctgcagcttcttgaccagcacctgctcgtacgagtacgcgtgcctggccaaccgcatccggctgaggattctgacgcggctggaggcgatggagggccccagtgaaggggtgaccaggtgctcgaggttcagcagtgacacactatatcatcacacaaggagcaacgccagcagcagcctgagtattgaggacgaggacgccgaagatgcgtcgcagtgtcgactgtcgacgccgaggactggtattgaggcctcgacgagggtacgcaactcagtggggaggactaggcgcacattgcaggaggagagagagaaccaggagattgccgttgtggactgcgagttgagagaccaggaagatcgactgagccggtgcgcggtgacgaagctggcggagaggtattttgaaggacacgagtgggtggctgcagtctgggttgcgttgctcatctgtgtggttacgaccgcgacgcttttgtttttgattcaaaagatccccgagctccactcgacggagttctacgagtaccgctggacgtttgctattgctacggggttcgtggtcggactttcggcgtgctttacgccggactggcagtacggagtcatcatgctcatcaagtatgtggtattcatcttcctcaccctgcattcgactgcctgcccgatgaaccaaggggactgcaacgtcgccatcgcaacatcgcatgtgttcctcattggcttcatggttgttttggtattccgcttcgcgtcgtcacgcagcaacgctgaagcatttgtgacgttcatgttggacgtggtggggctggtgtacatcaccggcagtctttcaattctcgtgtcgttcgtggacgacgatattcgaattctctaccggaaactgctaatcgcgctgctgtatattgtgtgggcgtccgacactggcgcgtacttggtgggcaaggcactcgcgtttttcaattacccgtactacaatccactggcccctcatttgtcgaagaacaaggactacgaaggtactctgggggcgattgtcttcggcatcgtggcgatggcggtggcgtcggatattctgaatctccccggttcatttggtacaaaagtggcgtacaccatcattgcagtggtcgctggcagactgggagatctattcgagagcctgctgaagcgagcagcgggggtgaaagattcaggcaaattgattccaggacatggtggtgcgctggaccgcatcgacgcactgatgtttgccacagttgtgttttctcgatactacgccttgcacacgtgaaggaagctcgacagatgaattgctgaatttattttttttacgaaggagcgactcgatgaaactacgggtgcaccaagatttttgtctaaagtatgaatatgaacgagtattgtgctgctagggttccttggtgacgtcgggtctcagaacttctaaatgagatagtccaacctcacagatctgccgctctgaatctcaactcccttccaagcgaatcctccgctgcgctcgccacaagaaagtttcccgtacatcaacggcgcgtcttcggcaacagaactgcaaggtgataataatgcaatgagctgcagtgtggcggtgtccaagcgacaaatcttcttcggtgcagttatcgttatcatcgtattccgctgctctttttcccacaatcgcgttgaatcgttcgtggccctcatgctggacgtgttgggggtggtctacatcatcggccctctctccgtgctcgtagcgttcgtggatgacaaccatcgctcaatctaccggaagctgctgatagtcttactctacgtcgtatgggcttccgacaccggcgcatacctcgtgggcaagacactcgcgtatttcaactaccagcactgctatccactagaccctcacttgtccaagaacaaagactacgaaggcactttaggcgccatcgtcttcggagtcgttgccatggccgcagcatccgagatcctggacctgccgggatcaatcggcaccaaagtgggctgcactgtcttggcagtgatcttcggtcgactgggagacctcttcgagagtctgctgaagcgagcagcccgcgtcaaggactccgggtcactcatcccgggccacggcggcgtgctcgaccgcatcgacgccctcatgtttgccaacatcgtcttctcccgctactacggactgcgcttctgaatggcatacatgtgtatacagcaaggtttactgttaaaatacacgaagcttatgatgataatcgcagcatggttatctcgtggcatccgttggcgcaacggcaactccagtcaggatcatgcgacagagtggccgttctcagcggtgtgttctaaacagtgcagaatcgcgtcatttggctcatttgccaagtggtcaggtcaagtgcgcgtcaaagcgtcatggccgtcgagcgaggcagcgcggccgcgtactgcagcaccgtagcagacggcgggtccgtcataatgctgcgatcccctccggacatgcagagttcgccacaggaggactggccctacgtcggccagggccaggaggaggcagctgtatcattttcatcctcaccctcgataatgccaatgccgaacaacaactcgaagcgatggagcgacttcttccagcgcaacgcggtgcagcgcgtcatctccgccgccatcttggcgccggccgtgacggtgttcctgtggctgtccccggcgttcgccaccacgaccgtctgcagcttcatgatcagcacctgcgcctacgagtacgcgtgtctggccaaccgcatccgactgcggatactgacgcaaatggaggcgctggaggggcctctcaatggacgaagctcgagtcggcgctgcggcaacaatacgtcgctgaatgacacgcaaagcaaccgcagcttctcgtccgagacggacgaggtgcttcaactggacccgacgccatcaatcgagagtgcggcgctgtttagctctgcggtccgcacgcgagtcacgaggttaccgcagcctgacgcgcgcgcagtggaggaggagcgggagaaccgagagatcgccattgtggacgacgagctgagagatcaggaggaccggatgcatcgctgtgcagtgaccagtctagctctgcgctactttgacggtcacgtgcggtgggcagcggcatttgtgtcggtcccggtgtgcgcgttaacgtctgcgggttttctactatcgattcaatgggtgtcggatttcgagtcgaccgagttttatacgtatcgatggtttttcgcgattccgacgggctacgtggttgcgctgtgtgcgtgtttgacgccggactggcagtacgcggtgatcacattggtcaagtacggcgtctttactatcctcacattgcactctgcggcgtgtccgatgaacgaactcaactgcaacttggcgatcggtacatcggaggtttttctcggtggcacggcgatcatcctcgtgttccgcttcgcgtcaactcgtggccgggcggaggcgttcatcagcttcatgctggacattgtggagctgctttacgtgaccggaacgctgtcaattctcgtggcttttgtcgatgataaccaccgcactttgtaccggaagctgctcattgcgttgctgtacaacgtttgggcgtcggacactggcgcctacatcatcgggaaggctctcgcgtacttccactatccgtactacaacccgtttgcagcacatctgtccaagaacaaggactatgaaggcacgctaggagcgattatctttggagttgtcacgatggtcgtggcgtccgagctgctggatctgcccggctcgtacggcatgaaggttggcttcacggtgctggcggtggtcgttggaatgatgggcgacttgttcgagagtctgctgaaacgcgctgcaggagttaaagactctgggacattgatccccggccacgaaggcgtgctggaccgcattgatacactcatgttcgcgacaattgtgttctctcgctactacgccttgcagtcctgagcaattattgaacgagagctgcgatcaccaaattatataacatgaaccaaataaagcgtactgcaacacggcaacgccagtgatgcaaacccagcaagagtaagatacatggttgcagcgagcgattcgtttgccgattagaaattaattctaatctaatttagtcctgtctagttctagattctaaaacagttgagcccggctcacgtaattaatcccatcccgtgctaaattctaaatttctatcccacagtacccacttgcccctgtcctcgacgaggactcctcgatgacgccgatggtatctcacccgccgcatcgccacagcccacacgagccctcgggcatcccgatcatggctcgaccatcggcagacgcgcaaaatccccccctggagggcagctacagcctgcaccgcggcgctcctctaccccatgcgagtcgctgccccgccttcctgcgccacaacgcggtgcagcgcaccctgtctgccgccgtgttggctcctgccgtgacggtatttctatggctatctccagcgattgcaacgtcttcggtctgcagcttcatgaccagcacgtgctcgtacgagtacgcgtgtctggccaaccgcattcgactgcgagtattgacgaagctggaggcgctggagggctcattgggcaacgcaacgagacccgaaactgttggaagtgaagactccaatccagatacaaggagcgatggcagcagtgacagtggcagctttattcacagcaggagcgacgtgacggccagcgcgaccttcgtgttcgacgacaccaccaactgtcaacagaggagattgaccaccacaagggatttacaggaagagcaagaaacaagggagctacagcaggtggattgtgagctgagagaccagggccagaggctacgacgaactgcggtgaccgggatggccaagtatgttttcggcggacgcgagtggcttgcagcagtgtgcatttcgacgctggtgtgcttcatttcgtccgcggtcttcctgttggggatggagaagatgcccttgctgggggtgaccgagttctacgagtcgcggtggttttacactgtctcaacgggcttcgttgccgcaatgtgtgcgtgtctctctccggactggcagtatgcggtcgtgatattgatgcagaacgcgatctttacgctgctgacactgtactcggcggcctgcccgatcaacgacatgtcgtgcaatatggccttccaaccagcccaagtagtcatgagtggcatgatcttcttcctggtgtttcgctttgctgtctgtcggagcagtgctgaagcatttttgacgtttacgctggatgcgctgggtctgatctacatcatcggcacgctatctgtacttgtgtcctttgtagacgacgaacggaagacactgtaccggaaattgctcatcgcgttgctctacgtcgtgtgggcgtcagacacaggagcctacatcaccggcaaggcacttgtaatggcgaaatacccgtactataaccctctggccgcgcacctctccaagaacaaagactatgaaggaacacttggggctattggattcgggatcgttgccatggttgtgtcatccgacatgctcgaccttcctggctcatttgggacgaaggtgtccttcactgtagtggcggtggttatcggccgtctgggcgatctctttgagagtttgctgaagcgtgcagctggcgtgaaagactccggctcgcttatcccaggccatggcggcgtattagaccgcatcgacgcactgatgttcgcgacgctggtgttttcccgatactacacgatggtgtattgaatgaaagttctcaagtgtggaccgtcgacaacagctcgatctatttgggcggatgatgcgacgaatttgggtagacctcaggttggaggtctgaggatgagcgtccgcaacatttatttatcatttcacgtaagcatggctacaattacattcgtttcgtttcatgtccacgtataagctttctcacagacattttgatctatccctggcgaagggtgggaaacgaggtctggcggatcgctgcatccagcgtcgtccgacaaatgtactaagcttacatgtagtgtgtgcaccacttgttagcggcaatgctaaacttcataacgcgatctgcttattttgctgcacaagccgcagcatagctcaagtgtatcagctaaactcgaaagcgacacgacccaccagggcatgaactggaggtcaaactcttcagtgtacatcagcaactatgaatcatagttgctgttcatagtctatgaagcccgctcgcagtgaatgtgcctgttgttcattgccctaccggtagcgtggcaactgatccagattaactcgaggattaattctaatccagaattaagcaatttaagttctaaaagcagcccggctcacgggcccatcccctcctaaattctaaaattaaataaagccggtgcagcgcaacttgcacccttcctgcactgctacggttgactcgcgggcggtcgttcggtcgcgaggatgaccccgcagccacagagccccgacgccagcagcctgctggcagcaggacgatacgctgggcattccgatcatgccgcagccgtcgagtgccgtgcaaaactctcctctggagagctcctaccacagcttcagccagtcgccaacgcgccgctgctcggccttggccttcctgcgccacaacgcggtgcagcgcacgctgtccgccgccgtgttggcgcccgccgtgatcgtgttcctatggcagtccccagccattgccacgtccaccgtctgcagcttcatgaccagcacgtgctcgtacgagtacgcgtgtctggccaaccgcatccgactgagactattgacacgcctggaggcgctggagagctctgtgggcagcttaacaggccctgtaccaggcatcagcgacatctcccagcaagacacacggagtgacagcagtagcgacagctttaccagcagtaggacgttcgactttgacgtgaccaccagtcggacgttcgtgtttgacagcacgaccaactcgcagctgcatcggagactttcactggatggcgacaggtatacagcaagaacaacgacgaccagagcgttccacgaagaacaggaggcgcgggagctggcgcaagtcaatagtgaactgacggagcaggcgccgaggttacgacgctgtgcggtcacggatgcggcgacgtacatcttcggaggacacgagtggcttgcggcgttgtgcatctcatctctgctttgcgttatttcatcgtgtgcattcctgctgacaattcaaggagtgagtgcgttggagtcgacggagttttatgagtcacggtggttttacactgtcgcgacagggttcgttgctgccatgtgcgcgtgcctctctccagactggcagtacgcggttatcgtcttcctgcagaacgccatcttcacgatcctcacgttgcactcgacagcgtgtccgatgaaccagctcacctgcaatatgtcgtggaagccgtcacagatcgtcctcgcaggcatggtggtcttcctgttgtttcggtttgctacgtgtcggagcaatgctgaggcgttcttgaccttcacgctggatgcggtgggacttgtctacattatcggcacgctgtcagtgctcgtagcatttgtggatgacgagcgacggacactctaccggaaactgctcatcgcgttgctctacgtcgtgtgggcgtccgacacaggcgcctacatcactggcaaggctctagctctcgcgaaatacccctactacaacccgttggctgcccacctatccaagaacaaggactatgaaggaacacttggcgctatcggctttggtatcgtcgccatggttgtgtcgtccgacatgctcgacctgcccggttcattcggcatgaaagtggctttcacagtggtggcggtggttattggccgcctaggagacctgttcgaaagcttgttgaagcgtgcagcgggcgtgaaagactctggctcgctgattccaggtcatggcggtgtgttagaccgcatcgacgcgctgatgttcgcgacgctggtgttctctcggtactacgccatggtgtactgaacggtgtccgtcatacgtcaagggcaggaaaagtctaaccgtgccatctttacggactcttcaacgtggggctgctgtctcctccagcagattttgctcgcctgcgtcacctccaaagcggagactaccatatcattgaacgtgtgtgccgtttgtgcgcgtgagtaagttgtttcatcggttttgctatatagatatcaatcaactccctcaaatgtgttctctgggtctagatccgcaccctcttgccccctctgctaactgcagctacgagctcagtacttggggtccactgcacgcgcccagttctgccacagcatcggagtaattatcagaaaagaaccaaaaccctcacaagagcttcaattccacgtgcgcaccttgtagtccgggtcgtacttgaagtcgccctcgttcaggaacaacaggtccgtcaacagcagcatcgtcaagaagatcaccagcgtcgcctgcaaaataataataaaaaataatgataagtaaccaaaacgatttttgtgacgtgtattctactcagacagcgctccgtacccagggcatccaggccgcgtccgacgccgcgaaggccacgaagatgaagaagacgatgatcagcagctgcagcttctgtcgcagggccgagaaccacatgatgccgccgtccgagtaccgggtactagagcgctccaagatccgccacttgcggggtcgttatgaactctgacacaaaagcttacacaaaataaagaacagcctattcattggtcaaaacccgcaaacccattaccccatcccattggcagaattaactcctatttcaaccaataaacgctagttgagcccttgccgccataattcaaacgccaccgccgccgtcatgcacccgcccgcgtccccggcgccgtccacggccgcgccgcgcgaatctgtgcgcatgaagcgcatgaagctgatcctgcagaaggctctggacgtgtcggtgcacgccgcgtcgctcgtggacctgcgcgcgtgtctggagagcgagtgtcgcggggacgaggagctgctggccgccttcttcccgccgccgacgcctgagggacctgaccacgataccacggaggaggtggcggctcaggcggtgctcagtctccgacagaaggtggaggagatctttgcgtggctctgtgagcagcacgacgtggacgtggagctgctggagctggaggacgtgatccagcaggcggaggagcggcgactgcggcaggtgacggcggcggaggaagagaagaagaagaaagaagagaaggagcaggaggagaacaaggaggaaggtggagaagatgacgagcagcaagagcaggagaagacgacgcctgaagcgagaattcgtgcagagagactgcgggccaagcaggaggagcagaaggagctggaggcgctggtggaagctttggagaccaagaacaaggagctgcagcgatctgtggaggagaagcgacggttggctactgcagacgtacagcggatgcaacgcgccgctgctcaactggaccaggtgagccacctcgctaaggactacgccacggctccgtagatgtgaggtggagagcttgggaaatatctagtttattgtatttgatcctgcgtcgaatactctgttgttgcttgtggaactagtgggattggaagaaggtttgggcggcttcttggaggacttggcgtgacattgccatgctttgctgagaggcagcgagctctcgacgaagctcttccaatgtcgtgccattctggaaattactgacgagagcttgcaaggtttgagggtccatgtggccttttggcttcgacttgggcttggaggaatcagtgcttgcacttggcggactgccttcagtagtgctacgcttcttctttagaacccccttcgacttcactgctgagccgtacgccgatgaagatgttggcttgcccttcttctttcgggcatccgtgcttacgctggaagacccttttcctccgcctgcccggcttcctcggaggccaccagaggcagcattactcgacagtgacgatgaagatgatgaagagttcgctctgccaagcgccgcgcgctgcatcagcatcttggtcttgctgtttctccacgactgctgttgctcgtctgcgtctccgtcgtcgtcatcaaagttcatctgctgcagttgattggcatacgcaaacgcttcttgcagaagcttcgggtcgatggtctttgatgctgaagcagccgcaacagcgcgaccaggccgactgggataggtcgtctgattatccggcgacgccctccttgcgttcaaggtaggaagagtgctcttcggtggcttgttgactggagccttcgacgtcttcccagatagattcgacaggctaggcgacggcttgttcaggaaatgctccacttcatcccagagccctcctccgctagactcttggggctcttcctcctcttgctgcgcctcctcagctgactgaaagctttcattgtcgtcttcatcttcgtcttcgtcttcttgctggcactgactgcgctgactccgcacacttcgagcgcttttctccgagttgatcgagcctgccgagtgtagatgactgcggctggaagatgcggacgagctggatgaacgcgcgctgggcaccaacggcaactccacagcactcatctcgtaatgcaggactggatgttgaacacggatgcgcttgctattgacagattacaccttgagtcttggctgatgcagctacacaccactacagacacgttttgccaccgagctcctggatgaccacggttcctccgtttctcgtcgactgaaatagtctctcactgacaaatttatcgtccgctacgacactataccagcacgtggaataacaccgagttgcccagcgcgtacagcgtgagctgagcagctcctctcgctaccaatccaaagaccacaaccgccacaacatgcaatgacctgccccgcaccgaatttccctcttccagcatcaattgtagcgccagcacgttcgacactactacaagcgcgccgataacgtgaatgaagctccagtcgaactcccagatgaccgtcagcagtgcgaacagcttgccgaagcttgagatgcacatggcgctgccgtacctcgtccatggcgccacgaccccagtctcctccttcttctccccaataggcagcagctttgctcgccatccacgtcgaaatgggtccagccaaattgcagcgaagactgccacaaagtacacgacgttctccagtagtgcaaggcacaccaagtgcagcgagaactggccgatccgcagtccggacgtcgcggcctgaagagcttccggggtgcggtacatggactcggatcggaaggtcacgccggcgccccggtccaccagataggccttgacgttcatgtccagcatcacgagcaccacgaacagcttgagcgtcgtgcgcgcggccatgggggccggcaggttgcacagcacgtggcggtacacttgcggcttgagcagcaagacctccaggaagagcaggatcgtctcgtactcgacgtatttgtccgcgaccgagttgcacgcgctgcagatggccaggcgcaggttgcccttgccgtagtcgcgcaccagctcgggcacgggcgccccgcactcgacgcacacgaggccgcgacgctgcgtcatgttggactgcgttttggtccgccaggacacataccacagtcacaaaaatgtcaatatttggtcagaaaaaagtatttgcagtccgtttgtgatgtactgtagtatatatgggacatacgagagaggactattttaatatacgggacgatttggtcgcccctttttggtcgcgaccctcgagatcagagaccgacatcaagcagcgcacggcaccaagttgccttttttacttgcggctacattagaactgtagacagacagacagacagacagacagacatggcgaaggacgtgcaccgcgttaccaatgcgagcgacgcgcgcgtgctgaaggccgcggacgagtccaagttcgcgtccttttccaaggagagcgcggcgcgcgcggctgctccggtgcgaatggattgatacgggctgcgaagccttcaatcagtccaatagttctcacgtactgttgcggtgatggtctgtatacatgtaggacctggacttccgtcgcaagacgtttccgatccgcacggggctcgcggccgcgagtctcttcgcgctgggctccatcctcatctacgtgagcacgctcatcggcctggacgaggaacgccgcggactatcgttccttatcctcgggcttatcggtaagactgagagtggacgcagtactggtgtctattggatagagatacttatcctgcgttgtgtcttgtcttgtggggatttctcagcattcatcccgggcagctacgcgacgtaccagctctacggcgcgtggaagggatggaagggctacaactacgaccagatcccgtcctacgacgactgagcgccgcaaaaactctacccccccccccccgtatcaaagacttctgctatctggcatcgaccaccttcatctcctacgtcaaccaacgcaaccaacccgtagttcctttccaccaatgaacaatgaacgaatcttcacgtctagatcgcattgccatcgcactcgccttgttgaatctctccggtcgctccatcatgccgaaaaagtatccgttaccccctgccctcctcgcgcgcccgtcctgtcgggcgcagcagtgcgccctgtcttgtgtgcgtttctcgacgtcatcgtcgccgaatcgagcagctttgctcttgagccactctgaaccgctgcagcacttcccttcggcggcgtcgcatcatcacttcgccttccttcgtgcagcacgacagaactccgtccatccatcaaccaggccaacctcttctccgtccgtcatgtggttcgtcggctggccgctggggctgctgctctcggccatctcgagcatcttcggcatcacgggcaagctgctgctcaagctggcgcacaacgagcgcgagaaggaggagctcgctgccgcccagcgcgagcagctcaagcgccagagccacggcgccgtggccagcccctcgctctccgtcaagagcaacctgggctgcacctacttctactgcggcctcttctccatgctcgtcatgaacccggcgctgggggcgctggcctactgcttcgccacgcagtcgctgctggcgcccatggcggggctcaccatcggctggaacacgctgttcggacccatcttgctgccgcacgagcggctcacgaccaacgacttcgtgggggctgtgctcatcttcacgggctgcgtgttggtcggcgtctcgggcacgcacgagagtccgccgctgcctgtggagctgctgggcgcccggttcaagtccttctccttcatcttgtactgcgtcgtgctgctggcgctgctgagcttcctgatccaccacgccaagcacgcgctgcacttcacgaccacaagtcgtcgggcaggggtcaagtcctccccggtgtcgagtcccgagcaactgccggtcatcgcgcgcgtgtcgctgagtgtctttgctggggttatgagcggccagctcttcttcctggctgcggtgatgaggatcgttcacgatgacggagctagtcgcatctggtcgttcccgttgacgtacatctgcatcatcggcgcggtggggacggcgctgcttggactgtacctgctgaatgaggcgctcgcggtggaggacgccgtggtggtgatctacctgtacgaggcgagctacatcatgtccggggctgtgtcggggctgtgcttcttccgggacatgaagcacctgccagtgtggcattacgtgctgtattcgctcagcctcgtgctgatcctattcggtatctacgtggtggctaagcgttcgttgcccaaggtgccggaagacgaggagtatttgctgccgctattggctccgcctacagcggaggacgcgtcggtcgagaggatattcaagcaggcctcgtactacgcgcgccgggcatcgtactccggaccgtcgatgctgcacgccatcagactcgaccgaaacgataccgagacgccagagcgccgcaggtcgatgccattcaagtaagtaaagtagccagcgacagccacaccaattttttctcttatggcgtagacaaaatgcaaggctggcgtggatgcctactagaagcatggtagccattctggcgcaacgtaagtgccccctttggggggttaagtaactacagtaaagctcaattcgatctgctacacgaatctactgggatcttgtaacgcaacctacacttcaagttgaagttgtcgttagtaacttcagaaatgatgctcgaagagcgccatggcggttcctaccgaaacctccatcctgcttcagactaacgttcacatagcaacagttatggacgacaaggacgtgtaggtcagcatcaataccaccaaaagagctacgttcgcttcgcttccattccacttaaatacctcagtaacatttccacagctacggtgcttttaagcctcttcttcagctcctaacatccgtgctgaacgtgacggtagcccacagatccgagtcgccgctgccactgctgtcatccatttcaacggtctcgcgcgccctgacatagagatagtacttgatgaagacaatagacgtgaagagcagcgcgtgggatccgtccaacactccaccaaagcctggcatcaaccttccactccaccgaacgcccgatgccttctttagtagtgacagaactatccgtccaaatcgcgccatgagcacgctggcagtagtgaagagtactttaggcaacacgccaccggggacatcaagaacagcgccaccaaacaccagcacaacgctgccagccgcgatggcacagagtgaagcctccacatccaaagtcacgacaatgcgcggaggcagcaacttcatgtgagggagctggaaccggaacatgatggcttcgcacacgtagccggcgaactgcgccacccacatggcactcagcattccgagccagatcgcagcccacgtcgcattgccgtcggtcggatccaccatcgagatgagcagtcccagcgctccagcaatgtagacgtatcccagtaagtcgagggtcagcgccacgacgaggttagcgggcccacgagcggagaacgagtgaacaaacacgaccgccattgcacccagtacgaaagtctgcagggatgttatcggcgctgcagtgcactcgaatttagccgctagcggacagttgaacgcgttcagtagcagcacctcaaatgcagtcttttgcaccaccaacgagaaggaacgaggccaggtagggcagcacacggcgcagagcgatgccacgaagttcacgacgtagaagtagtacggcgccgccgcgatatctcggggcgtactagccaccgggaacgggatcatcggagacaccatcgtcgctgtaacagaccagcaaaccgtaagcagcgcagccacgacaatgcgagtcagccataagttcccgcagaacagcatattcgccatcccgagcagcactccacgtgaggtttctaactccaacaaatgcactgtagagcgctctttcggacgcgcagtctcctcagccaccgggtatgagaaactgtccttgtttgtccccaagaaggtcatgttaccatcttccgaacaaagtacagtcgagttcgtcatcggcagcgacatcgtcgactgcgtgaagcccgcggccacgaacgagttctggaatcgccttccgtcctcttggtagccgcatacaacagacgcattgctgcgtgtgctagctccgatggcgtctccagcgtcgacaggtccttcgtttccttcataccactgataggtggctagcagttgagtgtggatgcggaacgacagccacgcgtgctcgtagcagcagacgcacagcaatatcgtcgtaagcattgccgctgctaacaccggccagaagatcaagccacacacaaccaacggcacaaccaccaccacggtacacagtcgtaaaaacgcattggggtacgaatggccacagcaggaccaacttccgtaaatgctctgcttccgcgaccttgaacggtcccgtgcttgaggctgtacagcttcttgcggttgaaattgctcacgacaatcctgttgtcggtcttcgtagtcatccaggaactcgtccgtctcctcttcctctcggacgtcaaccgtctgcttgcgactcatacgcgtaggcgaaatcgggttgtacgggtcattcgacctcgcggagcctatcggcagagctcctcgagcgcgaacgctgcgcttggcagtgtccaccgccttcctgtacctcgaatcggtgaagttaacgtgtccacgtccatccagcgtcggaactcgctccgtcggggtgacgtcctgcacgttttctccatccaagaccgggtttgtgcctcgaaagtccgccgttgcaactgcttcgttcctgctattttctccattcctgcgtcgcgagtgcgtcctggatcgagtgcttgcaacgcgggacctggaattggacgagtgggtcctcctagaagaccccgtccgtgtcgtggcattcatggccggcacattgtcctcgtcgatgttgaacagtaccgttcggttcgaagcggtacgcgacgtggtcatcgctaccggtagcgtcttcactaaacgcgaatgctcgagcggccaaagtctccgatgctcgagcagccaaaggccttccacggccagagagtgctcggtactttgtcaatttttcgagtgagcttttccaagagttgtgggctccagaagcggtgcaaaagacggcgaaaacgagacgagagaggagaagaagacaggggaagagcggcgagatcgggaccaggacgttgtgcgcaggaaacacatggaccaaaagtgccgcgttgcgtgctggctttgggttttaggggtgggacgaagtagccaataggaatcgggaaatgaatgaagcgagattatttaccggatgacccgtgttatccggacaacttcatcaccagtggattcgggtctgaagttctgatagatttcctacggaattaggcactccagtacaggaagcgcgagcggagcgggagaggacaatatttttcatgaatttactggtgccatgcagacacaagtttactattgaggtcgtggttggaacatcgccaagaggatcttccttactagcattaagttctccccggaattacaatacgtactgcttacacggaatggaacggagttagtctccgtagtaacggtcagatgagttgatgtgaacatataccgtgtcatgaattgggctgcatgtattctgtaacagcaggaccaggaggtcttgattggggtactgtaaccaggatcattttgaagtgcgagtctcatcatcgactagtggaatgcacttctgtctgcacagatggcttcactgtgccattcacccacagcatgtaagcggccctgggctcggatcccgccaacagacatcaaggtgctcgctttctgcggctaccattgttcagagcagcgtagtgcccccccattatcaatgtgtttgaaaatgcttcgcttgactcgtgctgtgaaacttccacagtgaaagctagcgaaacagctgcggacggcgtgggcacccaacagccaattcatgggccaccaatttcgcatccttcattgacactgcaagttttcgcgttcaggcaccggctatcatagcttgcccacgcaggttgttttcgcgaaggtgtcgtagtcgctgcgttatcaagcaccacacaccatgcgcacagttgcatcaaccaagtggctccgcttggtcgattagtctttgaaacctgttggagtccggatacctcatctgtcgttgaagcagcaaaactattaggcagtctcgttcccatgcttacatacttcgacgcgtgcgagaagcttcacatggatagcaggatggaatggttgcaacgagaatttattaacgccgtacacaagcgtaagtaattaaaactcatgccatgccaacgatcgcaatgcgaggttttaagattggatccacattctaattcatattcgaggctgcattgcatgcaattgcccacgcactcgtcttctgagatgtgcacccatcgtggcattttacatgtggcaaactatgagtggcattttaatagttatactgtataattgaattattttctttaggttgttcgtggatttgtaccgagttaggccaacggaacgacaccttgcaacctgtgattctcttcactggcgtgataccatgtacaggaccttacctgtgagaaagtgccgtttattgggtcaacgcgccagcgaagtagaagcacattgaaggtgcgtatgattttccgcggagctattcgcgccagcagcaacaacatgacggaggaggaccggtagacgtgttccccgtagtacaagtttccagtcagcagcagtgcttcaacggaggtacagcgctttccgttgtacacgacgtacgcaatgtcgtcgcagtcttggaagaactttttgactggccctccgatacaatttctctcaaacgatgtgagtttttgggtcaaggcaggtccgtgtttcgttgtgctcactgatgagatcacttcgactctcgtgatattccgagcagattcaagactccgcggccaaaccagtgaatgccgggatgaccaagacctacggagcgatgacatggccctcgtcttgagagcaagcgttctgtcggcatacgcgatgataaccgcttcgacagcaaacccaacagacacaagcgtcacaacggtggggatgttgacagtaaacaagatacacgcgtcattcagaccgcagtatttggccccacgaagggaagtcttgcgcaaaatctccgcgttatgtgagagaatcgacccgataggcgtgtgttggatggacttcaacagtaaaccgacactaagagtgatgacacgtgagtcggaatctccggtccagtcgctggtctcccgagcgagctttcaccaagttgatgaacgagtacgagaaggcgaagaaggagcacgtgaggttggcgatggatgccgtcgtcaatgttccggttgcaagtcccaagcatatacaagtcggagttgtagacgaggtggtacatgacctgcgcgaggtaaatcacctgcatgacgccgttctggcaccgatatgcccagatctgcgtgagtaaaaccgatcgcttgtgcgacatcacctggtagagactgatgacccccgaggcaagcatctgtgccaccacaagacctggtagcacgctgatagcaacagtatccgcgtatcgactacggaatgtgttgaggttcatacccacgcggttaggtacattcgggtcgatgtagtgctcccattcccacaaagaaataaagaagttgtggatgcagacgtctccagtgctgcatagaggaatatcatccggagaatgcaccattaatccataactcagccagcgtttagagacctcgcacgtgtcttcaatgtaaacgccggtagtattcaccgcacggacacgacagccgccatagtaggctcggaagtaagactgcaccaccgtcgtcgcaccatttttcgttttggatatatccgctggcgtagtgcgtgagattcgaggcaaactgctggtaaaactataaggaaacagcttcaattcatccgggaccacctccaacaggtctcgaccgtttgtttccagtgccaacttcgaacgcacaagctcatcggttatctccaatacagggcgacactctgcgtaatctgggaaaacgtgggtatccacggcaggaacctggccgaaatccgtgctacccgccattgtcgggtactggaaaagcctaacgactgacatcatagtccaaccggtaacgcactcgtcggcttgttcaatggctaactccaactcacgtatcatctgtggggagagattgagcttcgctatcttgataatgttgtagagttcttgagctgttcccgtgacgacgatcggtgcgtcccccactcgttcttgctgctctgacatagcgtaccattcgcatccagagcttccgagaacgcgagctcctcgtcactaagagagctgaagtcgtacaacgacacgtttggcgccaaagaggtgaaagtaaagaatggtggggcggaagtgatggctacattctcgatcaacttgtacttgagcatggcgattttacacgggccgaggcaccccgtgcatcctccagccatagacggatctcgctccgtgaatgcaaaaatactctggtcggcctgcatgaagactgaggcatgagataaatagttggtggtggtgaacagcacgatcaacactagtgggccgacgataacgtgccctgcaacatcgatgtatgccacgatgactgccggtcgaaaaagagctccccatccttgagacttgcgatcctgagcctgttggcgatagtacgcctccgcccagttttcagatacgcctgcatgggtaggaccgtccatccaggctataccagccagagtcaactcactgcgaaattaaacttggaatggctcgctctggtccgactgggaggtttcaatgactaaatatactgggtttttttctcgcgatggcgcacatgaggaatgagggcgacaacagaccgactttagagagtatgaagactcttctgctctgatgatacggctccagcatgagtctgcttcttttagcatgagccatgatcaacttcaaccggtttttgtagacgtataccggtatcttaccggtatttgtagttcaactcaaaagtaaacgtcaacgaagcagtcgcaaagtccccgcacacagatgaccccctcgctctccatggaggccgttgccgcggtggaggacgccttcctacgtggtgaatggacgcaggccctcaacgacagccgcagcatcctcgcagcgcgcatcgtgcaggtacaacagcatactttattcggttctctaaatcggttctctaacctttttaacacctcattcagcaccggcaggaagaagaaaccccagttggctcggcagttatggccgtggaagagtaagtgtgattacgtatttttccccaagctttcggaaaatgtttaaaatgttatattgcttttttctttttcttagggagcgcgtgctgtccgtgtatctccaggcggtgttcgagctggacctggacgacgaagtggagacggcggcgacaattgctcgagcttttgcaccgctgccaagtggaattgccattcagtggagcaaattcctagtggccatgaaccgacgatcaatggcgacacaggctctgcgagacctactggagtgctacgctgtggatggaggagtgactttcactacggagcaatataccgcagctgctgaagtgctggcgttgcagttgcttctgcctgatgagggaattgaggcggcgcggcaattcgtcactggggacagtgtgctggatgatggagccaaactggtacgaagcgggggaatggaggctggtgttaaaagttgacgctgacggtgttttttttattctgtagcaactgcttcgtcggcttcaagctgcacacttggctacgcaggagtctggcaaggttgctgagcagccttcggtggcgaaccagacgacgaggggagaacggcagttaaatgatgccttttatcagtctgcatcgagtggagataatggactgcagcgacgtggcaaggagcagggtgatgacgacagttcgagctacgttatgctcggtggcactgccattgcattggctgtcgcagctgcaggtgcgctgcgttaccgcgagaagattcacgagtgcgtctccaacgcgatcccggcgatctccaaagggctggcggatgcgaagtatgctctgttcgaagcataaacggcacgcctgtgcagctcaaaagaacgacgaaaggttaagtggcgttccccgccgttaagtgcaacgtgatagcatatttacccacctcttgcaactaccaaatcatcgccaaaaaattatgaatccgctcctcttttcccagcgttatccagctctcgcagccagacctggacgattgcgtccatacattcttctgcttgagcgatgacagtgcgatcaaacccaccacgcttgagggcttcgatagctgacatggtgtcgcgcacggcctgcgacgagtagataaccccgtcgtacttgttcacttgtcgccgttctgagttggcatcaagaacatgcagcagtctctcctccaacgtcctgggactttgacgctgagctggcacttgctgctcttcagcaggaggtccaacctgatggactgggaacgcgtccgttcgcggcaaaatgtgcctaggttcttgggatcgccgcgcactcaaaacctggcgttgtccagatgcttgaactgcactggagctcacgataaaccggttaccatgttgagaagcttccaaagtcgaagtttgactttgagtagcaacattaacttcatttggtgtcaagaagtttcgtcggtccacttgcgcttgttcctgggtagaatccccaccaaccgacgagttttcattcgcctgttgaatagtgttccccgtcctcgctcgtttcgaggctctcgcctgctctggatccactgcaatcggtcggagctgcagccagtcgtggaggtagagtccgtccaagtagtctccgcaaaagtgggcgagccctaccgtgtccgtgccaagctgcttccagcgagccagactctcctcatatcgagtcgtcagatccttccacatggcacagagcttggcggacgagtggtggggagccaacctcgggtcgatcccctcatatcgagcaatttgccccaccaccacatcaaactgcgggttttcactcgcgtaggccaccgccacttctctccagaacttggttctaccgtcgactggttctacctccacaccggtagaaggtagggcgccggattctaccattcgacggaaaaaggttggactgaacagcacattggccagtctgaagccgcagtgtttcgtcctaccttccacgtcaaatgtacccattttcttcttctgcttggccttggtcctgaaatttccggaaaatacctccccacgcagacgagcgcgtcggtattgaatcagtaattcgatgtagccatctttatggttggtcgacgggtcggcctgcgggtgcaggcccagctgggtacacgcagcccgcagcttcttggagtggtgtgtcctaaggaaccggtcgaaggcctcgtccgtcccgtcctgtgggaagtcgttgatcagctggccgatgtcaggctccgagtccagcgacctggcgatcataggctccagcggagcgagctcctcgctctcgttctcgaggctgctggacatggctgcagggatcaagaaggcagttttaggcctggcctacaggccccctacttctgacggatgtgattggctaattaaagtgggtacatcgtaccatttcatgctatatgataggttgcatcctaaactacgtacatgttcgtccgataccatcgaaggacgaagttgcgtatgcacgccacactcttagcgcaagctgaaattagccggtggcctgaagacaaaacgattgatcatctcgaatgcttcgagatgttctgcaatacaacgtccttatctcaaggtttataattatcatcgcggaggttttgcaagtcgtcatcctcacccccaacgccacaatcgaagtggcggcctggtgactaccgactcgattgtggccatggctcatccagacgatgcgaacggttcgacccctcactgggcgacggagtacagcatccagcagaaactcgctcagcagactcaagactggaagcgcctccttcatccgtccgtcatggtggcgagtctgacagttttaggacgcgtcctactcggtcctgtggcgcttctgctgctcttcaccgccaccaactattactccggcgcgggctctgttctcatcacggcttcggatagtttcttcgcgttcacggaacaggacatgaccatgtccggcgggtgctcagcttgcatcggtccgtgcaaaatcacgctgctcaagtacgcgctgttcaacgggagcgcgttcgtgagctccccggtcttcaacggttttgtcgcgctcggtgcagacgaatcgctgtacgacttcagctctctgagccccgaagctctcgctctggggcaatcgctggatgataatggggccgtttgtcaaagcggcacgaacgactggggggcgactcacaacgtggccacggggtccgctcagcaaatgctcgacatcatcaacacgatcggtcttagcgtcgcaccgcagatgatacgcgagctcgagctttctgttggacgcaccgatgggtgtgatacacggtggagcatactcacagtcgcgcgactctttcagtttccgtcgatagtgggcgatgccaatttcggtaaactgtctgcggtggatatcaacatcttcccggactatgcagaatgccgcccgacagtcgtgattgatgatagcctcgttggaaagaaggcggctctgctcacgaatggcgaagactttttacttgctgtgcccgacagtttgacggtgtttccgtacagcttttccagtagtctgcctcctgtttcacgtgaagttccagcgggcgtcacgaaattcccagcgacaaccgtcactcagcctctgcttcgagcctacttcggtggatgtcgcgtgcgtgaggtaaacacaacggggatctttatcgaggatacgtgcgagctgtcgacgcactgggaattgtacggattgatggtccattcgcccgacgatatcccgctctgtagtgcgggcgacgtgtgtatccacaactacttcaactcgctgtgggagtggctaaactatgtgtcggaagctcagcccgaccgcgccggtatgattgtcaactcatttcgcatccggtatgctgacaccgtcgatatcaatattctacctactctcgtggtggcgcagattctgctaatggggatcgtaagcttttatcaagtgatgtctcacaagcgatccgtgctgctcacgcaaatctgggcgtatcgctgtcagaatggacacatgcaggtggtgtatctcgctcagatcatctaccacctcgtcttctactcggatctgtacatgatcggcatggcgacgggtacgctgaccggcgagtccattgccaacctcacgtgctgcaccttcgccttctcgtactcgtttatcaacctactcaaggcaaggtcaggcgagcaacgactggatcgaaactttcgcttaacgtgggagacgatgcaactaattacgacaatttgtgtggggtcactcctgctatcggtgcagcggacgccgttcgcgtcgattatcacgaagaacgctgagatcttgcgcaagacgtcagcacgtggagccaagtactgtggcttgaacgactcgtgcatcctgttcaatatggacatggcgtccgtcatttcgatcctgtctctcggcttgggcgctgttgctctggtcatttctgcaatcgtgacgatgttcgctccaaagtcgaaaagtgtcgtgcgatcggccgacctcgtcttcgcagagctgagaaacctggcctcgttcaagaaaactaacaaaaaggaagtagacgacgccgaagccgagatgaaaccgggcgaggaactcaccactttcgagaggcactgccttggtgtgcctctcaatcgcctttttcgggactgcgacgacattggctatgaaatttacaacggcaagcgatgcacgacggtcgaggcgctgctgctcacgggatatctctactatggggagcacgtctaccaggcgtcctccgtgatgttgctgctgctagcgcgaatcgtgccgagaaaagtgctgcgaaccttcaacgtgctggtactgcgctggcacctgaatccgaaagatggcacgctctcgaaagcctattcgtgcacttggtatcacgccagcgcagaggatcacaagctggcgggaacgactccagtagcgtagctagttttagagatacaatttattaagtaataatactaagttcttactaagtatgaattactttcgctttcggttggacattgccgttgaccgataattctacagctcgaaacgttctcttcgattgaagttaacgaatcttctcgagcgcaattgaaactatctcaatcaagtcaaaccgattgcggagggacacgagtgattgaattcacttgacaacccgctaaactgaaaactgttctgcaaccccccccaactgaattttcggagatcatggaggagacgttgtctatccgcacagccacgttcgtcgtgtgcaaacatcgtctccccacaactggaggctggcttccgcatgtgattcgaagtattgatgactacttgactgggactttgagtcacaagactgggcgctgcggagaagactctggactatatctttcggaagaccgcgccgatttggaagtaggcagtgcaagctgccgttcgaggcggacacatgcacgtacttcgctggatgactgggcgtgacgacggtcgtggaccctggaaggctgattttaacaatgtgttggaaattgcagcagcccacgggcaccttgatgtggtccagtggctatctaagcggggaatggacagagatatactacagtcgactaatatgtctacggccggtgacttcgagaaggctagatattgcatcgaggatgcgttgagcctgacagcggagcacggacatttcgaggtgctcaagtggatttacggcacacaaacctacaaattccatggacattggagcccaatgggcaaagctgttgcaaacggccacctcgccatcgcccagtggttgcatgaggtcaaaggcgagcgctgctctgctgaagccgtcagcatctctgcgaagattgggtacctcgaagtgctgcagtggctacattccaagaatctttttacaagcaccagggcttcgatgcgctgggcagccattaagggtcggcgaaatggtgaaatggctgcacgcaactcatcacgaaacgtgctcgattgacgctatgcccatggcggcaagcaatggccatctaaagctagcccaatggctgtacgataacgtgcatcacacgtgtcattcgtctgaatcacgcgtaagagctgagaacgctgctggacgcggacatctaaatgtggtgaaatggctacacgaatactttcccaacgcattccgtgtcgatgcgatgaatagcgctaccaggaatgctcatacggatgttatcacttggctacatgaaaaccgaagcgaaggatgctccaaagagggtccaatctgtgcagcagcaaacggccacttggaagttctgaaatggctacacaagcactacccagaaacctttgagccagggctatatgatctcatggacgaagctgttgcgtatagaactagccgccttgaagtcgttcagtggctgcacgaaaacattccaaaactaagagcaactactgcaatgaagcatgccgcgacgagcggccgcctcgacattttcctgtatctattaccgaaccgaggggtttccaagcaacgaagaaatacttcatacgcaaaatttccaagtattgtgccgctttgacccgaatacccgtggaaagcgatgctcgaatccagcgacaagcgatcaagtgaagatgttgcagactgttttcaagcaccgtcatcacttccttaaatgttgtttatcgtgtctagcggggatatcgtgtagcagaggcaacaccgaaattctggattgggtgaatcagtttggaatcgagctgcggtcgacagagcccgttcgcgacgctgtccaacgcgacgacgtgaagctgttgcagtggttttccgacaatgggtttgagatgaaagacctgaagttgctcgcactggcagttggtagctccaatctggacacacttcgttggttgtcgaagcacgggcatgctgtggactcacttgacttggttaggagggctggctggaagtacaacacgtaccaaagtattccggtcttgcggtggttggtggaacacggacccccgctcgacgcgccaaccgcgacgtatttggtactggagtcccgtcacgttgagattgtgccatgggtagctgaaaagtaccggaaagacctcgtgctcatggcgcttcggaatgaccaaagagttctatggtggattcttgcgcgtacaaaatttcaggacgaagacatccaacggaagattctccgtcctttctccgtcctctaaccgagaatcctgtctgtcggtcatcgcgtcacgctttccgcccctacagcctagacctgtcaattagactacgctaccgcggccttattgcatacattattcactcatcaagtcgactcgcactggcttttaaactacttacgaaattacaaaactagacacaatcacgctaaaaatcgtacttacgcggaaataatcggactttaacgggtgtgattatcacatcccccattttgaaagttggcgcgcggtgggcggacggacggaggcaacgagcgggagggcgcgtggcgtacgggagtgagcagcggagtgcagcggcagcggacactgctacagtgagtacatgcatacatctacataaataaactactttacggtttcgggagttccgcctgttgggataactggtaccttcagggcagtcgatggattacagtacggaattaggggtagactggtgcttattaggcgttcatcttctaatacaccaagaatgtgtgcgaacgacgacctaacgctgcacatagattaactgataaacagcacgcggcgtggtatagctggcaatcgtgctgtattcatttgcaggaatcaagcattataatacaccaatatgagtagtcgcgtgctcaacttaagttactactgcgtagtagttggtcgaattaagtaaacccaggtgcatcaccagcgcgcgcatcgaggcgtcatacttacgactttttatgttttttattaagctgattaatggcaggatcttgctgcagtccgacactcgcttccataggaacgatagtcgcatcagccaagtgacaacaatgcactccaactcaaatcaaaatcgatcatatcccaggtgccctaactctcgcgcttcaacaaaacaattttagaaaatgctgctcgaattgcgcgcagcgcacaacagcatggtcttgcgcaatttcgaattactgttactaagtactgtacgccatgcaccaagagcaataacgcgttataaatccagatgaaagatgcagagtaggcaaagcgtagaatagtagtgacactggcaacgcatgcagctttcaaaataaatgcgcgctgctaccctagatacgtgtaccgtaaactactacagcatgcacataatgcagcttagtgtagacattgtcgttagagcaatatatatatatatatgaagctattggccggacctcggggtcccgcatcatgtaccgatggcgaccggaattatttatttttatcggcggggcagtgataatatatatgttgtgacaattttgtgataatttttcgagtttagctagagctcatttcaccttcaagcatctagcatccagtatgaagtctaggcgaactggaggtgcagaggttcctcggcgcaaacgtgatacttaagtattgaaatcgtcgtgaccacaaagctgctgcattcgttcgttctgttaagcgtcttggtgaagatacgaccaagaagattcaagctgactgctagaagctagcgcctactacagcagcagcggcgtcgggcacgcaaaggtgcgaactctgcagctctgtgcaactcgatagtcgatactaccagagatacatagcatcgatacaaacatgcagcacttgaatttaccgaatataccggttgcttatgacagctggcggggcaagcggcgaccccggggtcccgccaaacgcttcatatgcatatacacgatacacaacaacctaaccatcgaagacgcacagtcgctaccgatccgtattgagttgagctaaatttgctatgtctatttgaactgttatcgcgcaaaccagcattactacatgtagcgcggtgcagtgcgtaaattcatgctggcaaagttgcagtcttcagtgctaacgcagtaacaacactagagtacggtatcgacgacagctaccagtttgcaacgcagtataaaccacacccaatcatagtttcaatactttagttattacttcaaagtaagtaaacacgcaggtcactacactgtagtaaggcatgtccgtgacaatgtagctcgcctcgcagaaacgggtgatcaataatacaacggcaacgatattcagctcactcgatgtttaggtactcaactttgcatcgtgagcgacatttggtaattagcttaacaggaaaatgtattcctactcatttgctactaaagcacgaagttatagcaacgactatgtgtcaactgtatccgcacattattgttatggaaatcaaaatgatgcatatacttttaagctatgctattccagcaacccgtggtcaaagcgcccgcgtagcgggtgcccagagcgctggtccgtgaggctatacagaaccgcggtccgggagttgcgaagcagtggattgaggagagtttgagggaagtggaggctttccgttggtacttctcgacagcgatcaagagggggaacggggaaggcgaggagacagagttgccgccgagttctaagcgaaaacgttgcaattaagtaataaatcttaatcgaaccttctcccggatgacatcggggtgacagtggctatgatccaagctagcttccgctgcaagtcaaagtgcaacatgttttgcgaaagaactgaaatgtattggctacttttcgagtcccccaggcccccaaactcccccttatgtggggtggagggtctcgtttggggaagtgctgtgcttcagccgctgttgcttactcagaatcccaatcctcaccactgcgtcgtgggcataactggattaagatttacaccaaggcaacaaaaagctttccgaattgtttgtgtttcattgtattaaccaaaaagacactacagaaccgataagtctagagcgcctattcatacttcgctttgtagtcctcgcggtactttaggtaactcagtctttccgcacttttccctttacctccagccacatgtaaacagtgttttgagcttgtttttcttccagccacttcgcaagttgggccttctgcaaagtttcggctcttggcggcgttttcaaatactcttaatgatcttggcgagagcttcatcgtcgaattacttcatcaatgcctcaaacaaagacttctctatcgggttctttctgccaaaaagcgcccgataggcgacttaagtgttgatgctaagacatcgtcgcctgccatgttcaaattcagcaactcaaacacgacgtggggtgcctctgactgctcatccacccattgagctgcgccgtttccatttcttttccgagtttcgccgtgtcggacttcgacgtacttcaaccacgtttctagctgcggcttgtcaaagagtttatcccccgcgctgttcaccacccagttgtgtttccgggtgtacatttgcacgagtatgtcaaaagtacccgcgttcagcagcttggatacttctgtcgggtctttcagctcacgcacacacgtgttgagcagtgcgagctgcaagttcgctgcctctttctccgttctcgggttcttcttcgccaaactgagcatttgagccagcgcttcgtccgtgtattagcccagtagagtctcgatcacagtgactatctgtttgatgtcatctcattgaaccgatcgaggtacgctctccagagttggaaatggtcgctggcgagaaggttgtcgatcgccttgcttattttcttgtcaacaaaagtattgtccgaagtccgcacctctcgatacgtgcctttcatttcacccctgtccagtaccattttgtagaatatactccagggtggacaccgagtctgtagcgaccatttcacgcactctttatgtagcttcttggcgattgtcaaggtacttgggttcttcatcgccacctcgatcatggccagcagcgcatcgtcacagttgtgctgcatcaaggttggcatcagtagatttgggtagtccggattcttctttatgaactcatcagcgtagcgaaaccacaaaacaaattgcaggctgtcgacgagtttgtccatcgcaagaaaaacacccagtttctggaaaacgccatcgacaagcaagccttttgccttctcaacaacctggcgccgcgtaaaagatgcgagggggaataccccgctgctgtacccaactaaaacctcgtgctcggaccttcgtaaaaatccctcacagcacttctaaactcctccctttagcaaaatatgaggctgatgctttctaacgctggctgcatatcttttgtgtaccagattacactgtgtaaagtgtaatgtacactgctgattctggggggttctgcgaaatattgacgcttccggacaggaagagctattgtgaggctcgagggaatgatggcctcgagtatcgccagaaggaaagagagctgcagcatccaatgctggcatactgctttacctgctgcaaagaggagatagccttgccactggtgttttatgccttagcacgcaattcaatacatgtagtgtactccgcaaaaaacagggattttcacaacacacttagttacagttagtgctgtttgcaaacgcgtttgtaggtttgctgctcggatgccatggtgcgctcgcgggccgatatcactagcagatcaaattaatggctactgttacccgttgtcgaggggtcatccttacttttgagtacatttcgcggactttcgagtaatgagtactagtaatgtgctcggacttccgagtgcgtaaacttcatttaaactcgtgcggtgtgtcaacttgaaactattgacagaactctaaaggcgttgcttgttgagatgccgttcacgaacacaaataacgtgctacaaagcctttagtgcaacttattgttttctgctagatgacgcttgaattctctattagcttattcacgtccacataagtggatcaatgcgttactttcccagatgtattcacattgtatcctcctctggtctggtccaaggtggcgatgccggacgtggcatctttcctaagtcacattatgtgaaattactcagaagtcatgaagtgtactcacaattaagtagcacctgttgttccatgtacgcaccagggcgtagcaaaagtaatctaacgttagtgctgcttattttgaagagatcatggttggtgtaaagtagaagaccttcgcgagcttccgacatgtgaaaagagcttcaactcttttaattcaagataagtgttaaaaattgtctaactcctcaaacatgtaagccagattcacaacacactaacaaacagtttgcaaacactagtgttagctatacagttagtgtttgtgcgaacactagcaataacccaagaacggtacggtgcatgaacatcagataaggaatgaaaaggtgctgcaatattagtcaaggggtggcttcgacacggcgcatttatatgatttccaaacgggcaacttacgtgcattgatcagtctgttatcttgttctttgccatcgctggatgggaaggcgacccgagacttgcgagggccgagtgcctgcttaagggtgagggcggcagccagggctgctcgggtccttacagccggcgtagttccggggggtccttcgggtcgttcgggttcggttctgggtgcacgtatgcgctgacagtggcttgaccaacaaacagcgcgacagcaacgaccgcgaattggaggaacttcatgttgcgttactggtgcttgtagtgttgaagagttgcttcagggctccaaggcgaaaaggtaaatggcactgatctggccagcacacggaagtcggagcaattcttacaccccatagcgtgggcaatacagacgtgtggagtcacagggaacatgcggcaagcagacttgttttggttgtactatgagacggcacatgaacgcctctgtctattgcttggcaaggagcctgcttactcctacctactctttgaagaatcaagcaccacaatccgggtaatgcttatgctattctgaataaacatcttgaagccttatatttttatgatttgttgctcacagcatccgatgcttgcgttaaccgcgatctcacgtcatcagcgattcttgtctagaatctatctatctatatctatctacatatatatcactgaggagggtccctgaaaagatgcgcagacactaccgcatggcgatgcagatcatgaacagcgacccggcctccaatgaagaaattttcgcgcaagtttcatccaggatccgtccacatcgtcaaattgttaacaacctttatctgtgtgttgatagctttgactgcgtccaccaaccatactgaatccgtctacaccggcagatcacgattggttcagcaaagcaaatgctgtaagttacatgtagttgtaacgaaagcctcagtcgctttgctgaaaatcactacatgtaatgttttacttgagactcactcattcgacgcaaaacacccatgaataataagaatttgcgccaaggtttatccgttgatgattcgtctaatgttggcttcggcagtggtggtgaaaggcttaccgttcagaagcattccatgaatgcagtgagtgaaagattgacgaaacggcaagactattggggtctcagatcggatctcggattggatgtctggcaagcaccagtgcatgcatttgaaagctctaacaaagacagctcaattttttttctttgtgttgttgtagtgctcgatttactggctatgatacccttactcctactgtgtaccttctgttgccaagcaccgagcgacgttctcgcaaggccgtacagctcgagtccgcaagaacgctacgccccagagcgcaacacgctcgttgcattcgcctgagcctgcaactaacgtcagcacgagtacaatccacaaaggtgcctcctacagaaacgacacttttctaggcacttaagaaaatttgcaaaaatgatcgtatcgtgtagaaattcacgttagcgcttgacattttgacatcatttggcatgacgttagtgtataggattcaataatttgatcggcgactgccagctcactattattatagtagctagaccgcaaagtttgtttttagggctcgttcctaagggccgttcttaagttcccggtcccaagtcccgggacgaaatagagcgatttgattggctttcagaaagcgggctaggtttattttgagctcgttttgtcccggtcccgcatcattttcgcgtggtcgggacgtgggactttcgccctagctacttcatttctgcactaatgcgcgccaagtgtgcaccactttgttacgtttcgaaagggctatctgaccatgttcttctttcaccgtagttcgcggtagttcccgagagttaggggcttaaaaaatgcttacaatcatcaagtttgacggacgaggggtatcgtcccgttcgtcccggtcccagctcccgggaacttaagaacgcgcctaagttcccgggatgaacgggacgataccctcgtccgtcaaagttgataattgtatgcattttttaagctcttggttctcgggaactaacgcgaaccaggatgacaggaaatctgctcagataactctttcaaaacgcaacgaagcgatgcacgtttggcgcgcgtttgttaagaaatgtagtcgctagggcaaaaatctcacgccccgaccacgcggaaatgacgggacgaaacgagctcaaaataaacctaccccgccttcggagagccagtcaaatcgctctatttcgtcccgggacactgagctgtactatcttttttttctgatgatgaggtatattgaattacttaaaagaatcctaacaacctagccggtcaaaagaccagcgacccgacattatctagttctgctttcggctgccacaatggttgtaggctttgtacccgctttcagttgcccacgcgagagcatatagatgtcttctcgtatagcttgctccagtaagggtaagctgattgtcaagcaatcgaccccgggattgtcgtcgagtctgctgttggtccgtccgtagcgagtagcacgaatcctgcgactttactatcgataggctagctttggcgagctcgttttgcagaggggctggacgtatcgtcttgatcccacaaggcaattttcttccgagaaaagcaccattggcagacttcgtcgctgtcgatgttttccaaaagccattctctcatactcgagcctatatcatgagcaatagcactagagatcgtcatctgcgacgccttttcctcgaagcttgttcgcgtcaacagccaccataacaagttgtgattctcattctgcatggcctcgagtaccaattgaacgcgcacgggctcggaaacccaccacatggcctccacgtactcagaagttctagccaatgttgcagctgtaggtagatcaagcatgggcccgttctcaaggagccaccgtaccaaagtcacaattttgctctctgcagccagtaggaccaaatcaggtgcgttcagatcatacccgtgctccgaaagccagcaagttacctcgatgtgcccatttcgaaccgctacctgtaacaaatcgcgctcaaacatctcgaaacaattctggtgtagccattttaccactccaaggtcgcctctagcgacagctcggtgaatgggaactgtcgacaggagtttgatgtcaaactgaccaatccactccaaaatggacacgtggccccgatgaaaagcaacttccgccatgcagcggagacatccctcaacaaacgcaggattcatggagcgaaattctctcaggttacactcgattgcatcattccgagtggagaattcattctcaagtgagcacataacctctacattttgaggcgctcccatagctgaggaagaaaacccctcacttcggtgcatgaacagccagcgcgccacttcgaggtgtcctttataggtagccatttccattgcatctgctgtacaggtcgattttcatgcaaccattgaacgacatcgaggtgaccatttgctgccgctacatccaacgcacgagctgtgaatttgtcggaataatgctcgtgcagccatttaaccatctccaagtgaccaatctctgcagcatgccacggagccatgtgtgaacagccttccgttcggttttcatgtagccatatcaacacatccaggcggcccgtttcagcggcgacatccatggcaatctcggaaaagaggtacgtgaagtgctgatgtagccacttgagaatctccacatgtccgtatctggctgcaaacgtcgcagagctccccatttcccgagtaacacagggcgggacgttgttatcgagccatttggtaacttcgaggtgaccattctggatcggaaggtacagtttagctgttctacagccccctttaagagtcttgtgtaaccacttcagcacacccaggtggccattcttagctgctccatcgaccccgtgatccgtacaacgagaaatacccttggaatgtagccattgcagaatttccaggtggccttcctcggctgcagcattcggagcgttcttggattctttcactccatttttaaacagccattgcgccaccttcaaatgaccaccttcgacggcatagtacataggatcgcaagcaaaccctttgcgtcgagccgctgcaccacggctaaatgcccgtttgcagccgcacgctgtaatcctctggacaagttcagtttatatgcccacgccttggcatagtaacccggagttgaacttttcagtttccacaaagtgtacaagttagtacctcgctcgaataaccactagacgacattcagatacccgcgcgatgcagcaacttccagcacactatcgaaatccgctttccatgggccacgaccatcctgccggtttgtcatccagagcagaacatgaaggtgtccaccttgcgcggcggcgcgcaccgccttcttccaattaggtgtcgttcgcgacaggaaatattccagagtggactccattgctcctccttgacaagctgcattcagcgccttctggggaaattgtggacccaagtaagcatcgatagagtctaccacatacagaaggcaacaccctttggttaagaaccagtgctgatacacagatcgagcagcggcgtgaaggcatagcctcgacttcatggtaacgccagattcaaggcatagctatagacatcaatcatagaaagagctgtaaacatcaatcctattacttcttcaacttgtagagcgctgtggattgtctgtctcaggtgagtatggtgtgcaaccgcgcgtgttgttgctgctgctgatcaagtgtttctcttgaaatggcggatgcttatcttcgcagagtgctcgtggcacgagacaatcccgtagtcttgctcgacgggatagagttcaattcggtaacgttggggacacctacgtccaacatgaccccttcatcctaccatgcctagtcaacaacgccactcgcgacacagtgatgcggatttggacgctaagtgagcacgggacagcggcaagcggataacttccccaaacgagaccctccgccccggataaggaagctttacgtgtagtttcggggaggttgagggcctgtggtcgtggaaacaaactagcatgttttcacgaccaacaagacccctgtgagcgtgcagttaccccggtatgcttagtcttctcgactttggtgactcatgcagaatgtcaacccaggaaacctcttatgtaaagtgagtgcatcgatgcaagggattcgtccagtatgcaactacaaccaatagaacgatgaaaattatttggtacgcaccgcaaaaggaatgatcactatctagcttatagctttagccaagtgcactgatgctttctgtgtgtaaggattttcggagcccccttttcgagcgtggcactacacatgatgcagtagtgatagcaacaccggcatctgactaagccaatattcgattggggaagtcgctctttcagtttctcgatgaacctaccgaaactgagcgctctttcttcatcggcgacagacaaggttccatcatttgtgctgagtaggctattggggcccttgagcgtggtgccggtccttagatgttgcattccgtctccagcatcatggaatgagcgagttgcaacgtcaacggaagtcgcaccatggagctgggtctcctttgagattacaactgctggaataacaccttcgatgagggttaagcaacccaaaccaacgaggaggacacgtcggagacccggttgaccttgatacttgctgagaggattgcttgataggcagaccgctactgatacgggaaatgtccattttcccactttttcggaaaatattaccatttttgatgagcaaaatatgggaaatattgtattgactatttaataagctattgtttggagtatacgcagctaaagagaagtcacatagctactgcacgccttatagatcgaatagtcaaccaccaaatggatttacaaagcattcgctcaggttttcgaagctcagtctgataccccactgtgagaaatcgcacccaacaatgcagtattagtcgaaactacgagaactgtggttaccccgcaggacatcgctaatgaaggtaacacagtagaagcttcacgaaggctctgcagtgcagtgcgtgagttgtataactctttgggactggcgtggcaatgacagaggctggtgataggtatcagcttgctattttacacaggtaattgggcatgtgtgtcaatttgttcgtgttttcctatctacattgtttttttttacgttaaacaaacgtaattttggtttgtcgctgaaccggcaggatcgtcgtgtacggaaactaataaaaacatcgtcaggtacgagatttcgctagagaagtgagagatttctgtctaaaaagtgctgacaagtttacatgtttttgttcagcatttgctggtggtgtggtcgacttgtgttacgagagatggccgcaaaataacaaatagctgcctcatgcagtggataaaaccagaggtttagactgcattctagcattttaacggatctgctcttgtgtatgcaaaacacaagttgctttcatcgaaaattcgtttgcttgtggactcttcattgccttcgtagacaaaatagtgggtactaagttgagtgggttgcttgcagatacgcaagaataaaccatgtaactaactacgtaaaataggagaaaatggatgcaaggaactgacacaacttgctataaaaacagctagttccagtccacagcagctacatatacagctaaatgatcagactattaacccaggtggatagctccaacaaagcacatcaatcgactttactactatgagaaccctcaaatttctcccaaatccagtgatcgccaggatatgggaaatacgtgaaaaaatcgaaaattcccgtataggtagaggtctgttgataggtgataaattacgaagtgagctctcccagaacaagtgacagtattccagttgcatgcttctgtttgctaaggaacaaaactgttgggcatcatgtatttaattcagtatgacagataaaatatccacaagtgttcataagtacaaacaaataaatccttataaagttcacgccgaaaatcctgctatgaaataactatacatgtacagttggggagggtgctggagctcataagagtacttcgtagtgtaagtacccaggagttcctagtcacgttgtacttgtaaaatcttgcatgtatggtgcgatcctaaaaatgttttcccagctggccgtcattacggcttgcgttatctgtgtctcgttttgcgataacgcaagctacaatgacgaccagctgggcccgcaaatatatgtagcgaaatgggtataagcttacaataaaaatatatactaaacaaaatacaggtgttgtactgtacagcacaagtacagtacatgtacaacctgtccacgtgtgttgaaggagcatgcagatcatcattatatcacgtctggttatcacacgtcagcatgagacatctatttcgcgtgatcaatacccggatgggactaacgaatcgtgcgatttgcaattcaggtgaaatacagtacatgcataataaaacatagttaaggaaacttacaaaatacatagcaaaattgggctaactctgcgacgccaaccagcacggttggctgggtaggagttcagcatacgcgagttggtcgagcaggataattgtgcgcgtcatgtgtcctgcacgtgctctcacacaggctggtgatgtacaaagtgatgtgctgctcgaactgaagctcgctcctcgggtttcctccacgtatctgtagcctcgtgtccgaaggctatggtgctcggtaaaaatctccgccatgtagagctcagtctagatttcgctccgcaccacgcaagctcaagttcgccggactaacgatgcgtctttccttcgcctcattgctagcgattgctgccacactcctcgtcagcggcagtgcgcttcccactctgtcgaaggtggaatcgcctggtctgctgcagtccgctgtcgccagcaacgagaaaataagtctgcgagtgcaccacagagcaacggaaggcgatgaagagcgttcgatcggaaaataaatgttgaagagcacctctttcaagatgcggaagtttaaggagtgggacaccgcgaagaggtcatccttcagcatttgggaacgatgaaggagaaataccgaaagttctattaaccctttcgcgagtatcctcaataaattatagtatacaactcatcgatatttccttctaaaaggctctaggcgtccatttacaaagttacagagccttttcggtgtgtctcatgggacatgccatctacggtgattttcaggatacataaaatgtatgcgtatgacttagaatctctatagacaatgattacatgatggttactctacgtacccgattatgatttgttttaaaagaaggttgattactagcttgaacttgtgcaaaagggcacaggatgcgccctttaagagggggtacactctaccgtgttttggaaaatcatctaaagggcgctttctgtatccttttaccgcgaaagggttaatacaaccagtacgctgaatatagaaacggcaactatccgttatcgtcttctactgggagaatggacccaaatccaaggcaccgtcgacactagatcacgtaaaaaaaactgtaaggagcacatttcaatcattcaagagagctgtgaatatgtacttgatattgacggggggttccttttggtttgtgaagcgggccgcgttttcaggaaaaccgattttgacaatatgctacaagttgcagcaattaatgggcctcttgaggtggtcagctgctacttgagcggaaaccttaatattgcgcagtgcttgtacagcgttaaaggtgaatactcctctgctgaagccaccgagggaacagttatggatggacaccttgaagtgctgcatgcgaacaaccttgttctgcgtacaagtcgtgtgctctggtaaaatggctccacaagacccatcacgaatggtgttgggccgaagctatgggcccagaaaccagcaaaggcatcgagagctggccgagttgcttgacggaaatatacaccgcaagttttagaattacacgttatccacggctagtatgaatgcggcagaagcagttcaatccaagcaagggatgctcgaagtatgcagcgtatgatgctgcactaaatgagcacttggaagttcttaaatggactcacatgcactattcgaacgaggtgactccagggttaagttagatattggaccggacttacaaatgcgggcattagccaaatgagaacgacgaactccgcggaccatggcacaaggaacgcgcttattaatctgtctggattttttcagcaaaccccaaagaggcacctcgatacgaggggagctacgtacagccaccgggaccatactccgacgctgatcactagtctgaacctcctcctcctctcggtattggaccggacagcggaaaataggcgtcttaaaatcgccctgatctgagggctaacgaagtagtgtacaatgccgctgctagacgtatttaatctgctcgagcatcgaacggaaggtttcctgtgggtgcgtggtataacacgcgagataagcacgcattgtgtcatttcggccccgatgtccgtgaaaaccgatgcatcaatccagccactactgaacaattaagacgttgcggttggtgtctgaccaacgacctgattgtgtctacgaatgtttgcggtgtaagagtcaacagcgtaattctggactgagtgtcgataagccatgaatgccgtgcgccttgctcgcacgaggcagtcagtctatcgactacaaaaggggaggttcgaataacatttttaaacgttattcgaacttctccatttaaatatcggagaagttttatctggcatagggcgctttcattgcttcgagtccactgtaacactacactttatactgagatagcatgtgtaccgtaaggtatgctgctacgcagccggcacaggattaaatcggtgtcgcatgaagccgtgcgtgtatcgcacctgtttaagtatccatcatatattgaaattttatgaaagtaaacttaataggttatctaaataattatctagtcggtctctatcggtgaggaagcatcaatcgcatcatcaggtttcattcgaaccatttcccattctcacgcccgacccgaagacgctacaccaggacgaagttacagcacgaaggtaagtgcttggcagggcgctgttgcagctaatagcttgcttgtatttgattattaacagcgcggaggtaagaaagtaaattgatattaactctagtgggttattgctgcttatctggtagttgtggatgttcataatatattacgcacagcgcacacgacttaggcgcgccgcacttgcggcgcaccagtcgtccgcgctgtgcgtatatctattctgttttattttcgctatctcagcccccgcgaagccctagttttcattatgaccggcatactctggtaaaggtgccagagatggcacgctgtagttcacgagtgtatcctgatacttgcaggaaaataaccagaatcgattcttaagtaacactaaagaagaaccctgaagtaacggaagcttgttatcagctgtttgacgctttcgtgtatctttcgagatggagaccgagtgggcgttcttgcagccgtggcgggagtcgctctgctccgtcctgcagctaccggcgtctgcacatgacacaggcgagttcctcgcagccttcgagtgctggcccgacgagtggggagacgaatccgcccttcgtaactgcggacaagtgcttcctgcgcgtcagcttccccactgacccagggcttcgcaggggcagagaaaccccgcagcgggtgcgagaagccattgagctcttcgacttcctcgcggcggtggacaacgtggccttcgagtcgctcctgtctgagtacttttatccactggaacccgccccagcagggcaccaagggccgaccccacgtgttctggcccacgtgggagtgccaactcgacggcaagctgtcaagcgaagacgcagtcaccaccacgtctgcagttacatgggggcagctctttggctgccctcttgacccgtggaagcactcgaaggagttccgcgcagctatgaacaagctggagaaaataaagttcaagaagggcggcaagcagcacaacaaggctgcgagtatttcctggcaggtgtttggtgaattcctgttcattttccaagaacctgtcaaccaggggcgcgcaattcgagctgcacccttgtcacgtgagctgaacaggttgcttgaactggaggtccctcccgttgtttagctgaaagccgtagtcgacggttcgaagattgtggagacgtggctgcggctacccaaacgtgcaattaccaagccgataccatccaaagtagagtttgcggcggggttatactcggactcgacgatgcctgacatagcggtggcgctagctcgaactgacatgtcgactttcaaactcgcgaataccccactggatccccgcttccagatgccagagtgaatgctggctttctgctgggcacactggtgtgcggtcgaccaatgtttcttcccgctggaaactcgcggtcagcgcttgagcgatcaggaacgtgcactcgttgggaccttcagctcagcggtatttccgggaaagggtttggagcgatgctatcagcttttagtgatcgatacgctggtactttcaacggttgcagctgatgacggcattcgtaatgatcccgtatattgggcgtggctcacgtacgcgttctggagcaaggcatcgcaatcttcagttcagacgctggaaatctcgcaaataaatctgacggaagagcacgtgaataccatcaagcacgtattgacaataatttatccagggccaaaagcggctactggttctgctcgatctagattcggatatgtcgacatgaagaagggaaccagagtaaggcccactggggaacgcaaccgggttttggagttgtctcaagatcgctgttgtcgcgctttctacgatgaatcaagcttggacaatgtagcaaatgctgtcattccaggctttgagatttgcaaggtgaagctgctcaatggcatgaccaagttcgtgggagatacgttgacgtcaagaaaatttggtccgacaatgagtgccagcggaattcgatcccagtttgacactcaccgacgttgacaatgactcggtggttttaaagctgttcgccatgattggaggggggcttcacacgctttctctcaagttggggcgaaatcgtgatgttggattggatctcagtgcgcttgcatcctcttgtcctgcactgaaggagctccgcttacgtgattggaacgtttcgttgggccacaatggtgatgctttacgggcatggggaatctagaaactaatacttcgaggatctgcaatggtaaagaatctagacgtatgtctaagcaactcggcgtaccgaatgtcacgggaattggttcagctggaagttcttccaactcgtcgagcaatgcagcgcacttcggcaggtttgacgcttccgtacgtgggatcgcttatagcgcatgacaatgagtatctaccgctggagaaggagaggctctcggagcgctcacgatgcgcgatgattagtatattgagtgccaggaccagcagcgtgcgtgcggctcaatacctggactcaaacatgttgagtctggttttcgcttttgttgctgcacccgagtcacgctcggtcaaagcaggtttgttcccacctagaggcgattattttcgttgaaggcgcttctcgcgctattggaacggagagagatgacgaacatttttaaaaaaagaagttcctgttttagcagcgacttagctttggcggatgagcagcatataggtggaaacgtattgtggtttagtttctcttgcgttcatgctgccaagcgtagaagttaacttcactcaccagcactcgacgctgaacttttactatacttgaagtatgcgtttaggtggtgaatcacatgacaaacactgataatattgactaaacgggaaatttatcgttggtggcgagggggaactcgccgtcgtgctttttaacacttacttcatccgcaggtatttgcgagtcaattaatagtagctcggtttcccaaggacccgacaacgtgtttgaatgctctgggagaagaattgtcttttaagacaattctaaaaaaataggttcaccaaaatcgggcttaaggctctaaaactaattatcagcttgctccgtcacagtggtgttgttcagtttgctcggaaattccgaatcggaatacaactgaagttgcacttccggataatccacatttttccgaatattatctgagattctgaagcattgacttttggattgatgcttgtagctctcttctgccgaatatgctaatttcagatcttttcaattggatggtgttccttcatgccgccactcagttcgtgctccagaactggttccccgcaagtgaagaataccttctgccaggagtgatagcaggttgtatcaatgggtttttaggaccgcttttcttccagaaaggattgaatgccgcgtgccaagggggagcgctggaatctactctggaatattttctgtcccgagcgacacctaattggaaggaggcggtgcaagctgccgctcaaggtggacatcttcacgtcctgcgttggatgtcgagtcgacaggacggccgagggccatggaaggcggattatgataatttgctgaaagttgctgcatctcacggacatttggaagtagtcaagtggctattcgagcggggtacgacgcggaggttggaaaggtcggctcgaaggcgctatgtgtctcaggcacttctggcggcggcttcaaaaggacatttagacgtcgtgcagtggctctacgaggttcgaacagactcgtccaacagatacaacagccccatgttgcaaacggacaccttgccgtcgcacagtggctgcatggcgtcaaaagagaaacgtattttgctccagccgtcgatgaagcagctcaaggcggacacgttgaaatgttgcaatggctacattcgaatcagcttcttgtatgcacgacgactgcaatggataaagcggccgagaatggacacttggaggttgtaaaatggctgcaccgcgtttatcacgggtgctgttctccgatggccctgtatatagcggtcaacagtggccatcttgaactgatggagtggcgtttacaccacttgccaccgctacgtaccatacatggatgtcgtgtctgcggctgaacatggccatttgggcgtggtaaaatgggtgcatgaacacttcccggagtcgttcagtacgcatgaaatggacgttgcggcggaaaatgggcatatggatgtgatcacgtggctccacaaaaatcgaagcgaggggtgctccgagatggctccttggaatgctgcgcaaaatggccacttggaagttgttaaatggcttcatgcacattatccggatacatttgtacccgaggtgatggatgaagcagctgaaaatgggcatctcgaggttgtccggtggctgcaggaaaatcgctccgacggatgcacagtgcacgcaatgtactgtaccgccgttaaaggccacctcgacgtcttcttgtatttactcgagcacaggatggaggggttctcaagagaaaaaatggatgaggcgagaagtttcgtaaaatgccacttcagccccgatgcacaaggaaagcgacgttcaaatgcagcgactagcgatcaattggcgatgctgcagagggtttcgagcagcgtccagattttgttcgaggttgtttgggatgtctagcgtggattgcaggcagtagaggcaacatcgcaatactagactgggtgatccagtctggaatcgaggcgcgatcgacagccccaattcgatatgcagtcagccgcggcgacgtgaagatgttgcgatggatttctgagaaaggatttgagatttcagatccagatctacttgagctggcggctcgacatggacacctagaagtcgttcgttggttgtcgaatcacgggtatgctgtggactctcttaagctgtacaaacttgctggaaaaagagcgaacgtgctggtgttccgatggctgattgagaatggaccgccgctcgacttggccacagcgatattgttaatttggcaatatcgtcttgtagaaatcgcttcgtgggtagctgaagacgtccggaaactcttcgtgtttgaggcgctacggaaaaatgaccgaagagttctgcggtggattctcgagcgtacggaatttcacgatgaaagcgtgcaacgggacatccgtgacgcaatccaatgctgttctacggatacccagcggttgctttgggaagatatgagtgaagtggagacctgtcgttggtgctttccttccaagaggaggatcgacggatacggggagacagatatgccaaattccaagcaaagacggttgcagtgaagtagcgcactgtttcagaatcttgtagtcgcaccactgactgattgaatgaatgaataggacgatccgattcactgaaaatgtttcgaattaccacaactgaattttctcggttgccatgaagcagcagtcgtgcgtccgcacagccacctttgtcgtgtgcaaataccgtctccacgcaactggatgttggcttccgcatgtactgtgttgcatcgacgaatacttgagttgtagtttgaatcatgaggcttttgccgctgcttgcggggcggacgcctcgcaacacaccttggagtacgtacttcgcaatactgaccccctttggtacgacgcagtggggtccgccgtacaaggaggacatttgcacgtgcttctatggatgagcgagcgtgaagacgtccgcggaccccggaagtttaactttggcaatatgctacaacttgccgcaactcacggtcatcttgatgtggtcaagtagctattcaagcgtggcacacgccattagaactcgagaaatctcccgctggttacaccgagaagagcggtcattgcacaggcgaggcgttggatctggcagcggagcacggacatttcgaggtggtcaagtggctctatgatactcgtacggataagtgcagcgcgggctacgccatcgcacagtggcttcataacgtcaaaggagtagagtactcaggcgaagccatcgacaaggcagcccagaatgggcacttaaaagtgctgaaatggctgcatctgaacaaccttttcacgtgttcgaaggctgcgatggaaaaagctgctgagcgcgaacacttggaggtggtgaaatgactacatcaagttcaccacgaatgttgttctgcacaagttttgcggaaagcggtcaacaacggcgatctcgagctggttgagtgggtttatgaacgcgtgtataacgagtgccagctcgacatacgtgtggatgctgctacgactgcggctaaagagggccgcttggatgtgttaaggtggattcatgaactttttccctgatcgattactatcgatgtgatgaatgccgctgcaatagctggtcgcatggaagtgatcacgtggctgcacgagcaccggagcgaggggtgctccaccttggcaccgcatggtgctgcagtcaacggacactaggaaggtctgaaatggcttcactcgcactatccgaacaagttaaagtcagttatataggacaatggatcaagcagcaagaaacggtcacctcggggtcattcggtggctgcgcggaaagtattctaaactaactgcacactggaatccaatgtacagcgctgctgctaacggccatctcgacacatttctgtatctactcggacacggaacggaagggcatcccgtcgtcatgatgatgtacgcgcgccatttccgagtaatgtgccactttggctccaatgtccgtgtaaatcgacgctcgaatccagccaccaacgctcaattgaagacgatgcagaccattttcgatatctcatcaactttgcttagaatacctagcggggattgcatttggtagaggccatattgcaattctggattggttgaaccagtttggtctccaactgttttcaacagcgcctctccggtgcgttgtcagtgacggtaacgtgaagatgtagcagtgagtcttcgagcatggatttgaggtttcagatccgacgttgcttgtacaggccgttgaaaacggtcatctcgaagtagttccttgcttgtcggagcacggagaacgttggccttggaatactgtcacgttgacattgtttggtgggtagcagaagaaatcggaaagatggtcgaggaggtctatggtgggttctcgcgcgtacgacatttcaaaacgaaagcgctcgaaggagcatccgtgacgccatcaagcgctgtccgatgaatactcagcagtggcttgaggagaatatgagcttcgtggaggtttgtcgttggtgctacccgatatcgatcaagcggcagactgaaaatactaaggaaaaaatgatttcctttgttgaagcgaagactttgtaacatttagaagaaatatgtgagggggggggcagttaaaatagttattttctaaatatttcgaggatgttgcttgatactttaatttttgttctgctataaagcccagtaatttcaaaacgagctctaccccccccctccccccccccccccccccccccgatttaattcacaggtcgaagacctgtgcttggccccggcaaaaaacttgtaactttccaaaacctggtaccaaaccaccgggtctctctttcttaattgtaatgcttaagctaatatctgccggaatcgggtacccgtcgataaatgctaaaatttatgcacattatttaccaaaggttgatactaatcgttcattcttaacctaaacctgcgttcaaacacttacggacgctccagtacactatgagagcgtcatggcctcgctgaaggcgtatcaatttgcgccatactcgatcaagcttagctgaagatggccaatatgacttgtctagctgcaggctgcattttttacatgtcaatttgctcaatactcaatcacttagccgaagatgcccaacctcgtgtctctcgccaaaccaaccagctcaactcgacagtgacacgagcatcgttcgtttgaataagacttttttccccctgtgaagcaaccacttccaaggaattggcccattagcgtatttctcatcccacaatttaccccccaagccctcaagttaaaagtttgtttgtttgtttgtttttgaattgaggatcatttcagtgcttctcccttcgagcatagcgcgtcgttggcttggcccacccacgtgtttgccagcgtcgactcgttagaactggtgggcctccagtttagtgttgagacagccctggacttgcacgtgaccgcgatcttgaacaaattcacatggctgcatatttttcttgtggcttaccggtatcttaccaaactccaccaatcagaggccgctatttcataccggtctgcgcaatcgcgtcgaagttgcgcctctacccctttcacactgaaatcgcccgctgacaagcatgctggtgccgaccttctcgtccctgtcgacggcctcgaccgacgcgcagtgcgcgctgctgcgccgcctgagcaccttgggcctcgtgtacgccaagctgccggtgcgtcagctgcgcgagctggcgccgcccgtgccggccttcaacacggagccgcgcgagctggcgctcaaggggtcgctgctggacgcgcgcacgctgctgggcccgttcccggccgacatgctcgagtcgctggccacgtggctagaccagggcatcgacaaggtgctggtggacgccgcctccagcgacgacgaagagctggagcgcgtggccgtcgcagtgtcggaactgccggccagtcgcgtggtgctgcgcattcccgtgccggcgctgcacgcgcgcgaggtgacggagctccgcgagaagctggcgagactggacggcaccgcgagtggcgtggtgttcgccatcgactcggtgacgttgacgcaggagagcggcttcgaggcgctgttcacgagtctccaagcactgaggaagagcgtggacgagggcttcttcttcgcggtggagatgaacgctggacctgctgcgggattcaactcggtgctggctctggccaggatccaggagttccaccacaagaacatccacgttgtggcgcccggatactgcaacggggagggcgaggagcaggtggacatggtcacgagtgacggcgaagcgaccgtggatgcggcgctgtcgttcgtgcagtgtctgcgcacggaccggcccgatggtctgttcacgaccgtcgtggcggatgaagcgggagtggcgctcggtctggtgtactcgagcgcggagagcatcttggccgcggtgtccagtggacgcggtgtctactactcgcggtcgcgtggcggcctctggaagaagggcgagagcagcggcaacgcccagaagctcatccagatcgacatggactgcgacagcgacgcgctgcgctttactgtgaaccagacgggtgctggcttctgccacctcaacactcgcacgtgctggggccgtgacggcggtctccgcgccctggagagcatgctctttagccgccacgcccacgcgcccgccggatcgtacaccaagcggttgtttgacgacgcagagctgctgcgtaacaagctggtggaggaggcgcaggagctggcagaagctgaatcgatccctgatgtggcgggtgaggctgccgacgtcatgtacttcgccatggttcgttgtgtcgctgctggctgcaagctgagcgacgttgaggtatggctacagtttagtttttctgcttggtttccggtggtgctgcaaagctttgatatcctaacgcattctgttgatcctgtcgttccttacagaaaatgcttgacaagcgcgcgttgaaggtgaagcgacgacccggcaactcgaaggcctaccgcatatcagccgccaacaagatcctgaacagcaagggcatgcagagcggctccagcgtagcttcggtgtcggcctccgcagtcagtgagcagtaagccgagaggtaatccgctagaagattatccagtcagtctactggatcactcccccagcatcccccttccattcctagagtcaggagaaagtgttgcgcgcttaatgcgcagcactaaacacgcagaagccttcatcgtagtatttttccttcgtgtttctggcagttttaacgtaagagggcagccacagcacagcagcccctaaatcacggcacttcaaagaagcttcctccttcaccttttcgatctcttcgtagagcagcagctgaagaaccgaactctcctttaaaaaagtgccgtggattgcgtagcaatgggccaggaagacagaagactcaaaccaacttcggagacgccttcagtctactcgtcgtcctcgtcgtcctcgtgggcgtcctcctcctcttcttcctcctcttcctcgtcctcctcctcttcttcctcctcagcgaacttggaccagtcgatgtggtggtacagacgctgtagccaaacatcaaatcaaacacaagccaaaaaataggggtcagcaccaccagaacggaccggccatcgactgtatcacagcctcctgctcgcaattccaatgcaagtaatttgccacgtacgccgcggttgttggcctcccagatgtagttggtggccgagccgtagacgccctccaccaccagcgcggcgatgagcaccgtggtcacgtacacgggcgtgctcttcatgaacagcttgtaggcgccgtccagcgagcccttgccgctcacggacgagcgcttggtggaggccatgcgggcgccctggcgcttggcctgcgaggccacctggcggatcgttcggctcagcatcgtgtgtgacgttccggcggggtcgacgacttggactgtgtgtgcgccttctttagctctacagcaatggccggggagggaggcgacgagcctgcggttctgagaggcccagcccctggcgcaacgttcgcgcgacaatcgcgtagtttgggcgaagagcccaaatcgggctagtttgggacgcggcggttcgctacgttgggcaacgcacattctggaaaaccacagcccccacaccagtcgcacaccagaaagagccgtttctttggctgaaacacagaatcttgtgtatttttcaaaaaagttggagcctgcaaatattacaagtcattagatctgcaaggtactatggactcaaaacgaaagtgtttctgatgaaattggtatatattatacgcggatataaggttaccgaacgctgcaaaatggcaaccgctactgtacgccggaaaaagggggaggatttcgattcaaaacggcggcgcgaatatcaagaagaaattcgccgcaagtgcaagcaccgtgctgcccagaaaccctagaaggcggtgccgactaccgactagcggagccccgcgcacaactcaactgccctcgtcatggagcccctcgcgaccggcaagcggcggcgaccggcgtccgcgtcgctgtcgccccctccgcctccgcgccagcccacgcgcgacgacgagcagctcgtgagctggaagaagcggcggctcgagtcccccaagaagcggccggagctgcgcagtcccgagccggaggagaagaagcccgcgcccacgggcaagcggcgacgcagcgtcacgcccgagcccaagcaggagcaggagcaggagaagctggaggagaccagcaacagcagcgaggacaaacaggagaccaagaagcgtcgcgtagcggaggagggcagctcgacgtcgccccctcccgttctaccggcctctccgccggccaatctaagcgagaagcactcgcagacgccgtctacttcttcagagcaggaggagaaacagagcattacagaggagaaggcgaggttccctccgccgccgctgatcatcccctctgtacgagaagaggagcaggaacaggaggaggaggatacccccaaggagaacagagcggacgccacgttcaccaacttggaccagttcgtcgtgagctcgcagggcagcgacgccgacctggtcgcggcctgtgccaacctgcacaatgacatcgtgagctgcagccaggactcgcagggcagcgacgtcgagagagtacggctgcgcacgtcgctgcgtacagttcaggtgacgcccccgccctcggcgcggatgctggacagaaagaaccctccgccgccgcccaagagacccaagagacgacgcaactacggcggcatcgtgtacgcgcggacgtacccgcggctggcgctgtcccctctggtcgacgactctccgccgagctccccgcgcgtcttccggtccctggagaacgagttcgccttcgccatgcaggacacgcccgagatccgcccccgcgtacggccggcgcccaggatggccaggggcacgcggcggtccacgcgcgcgggctcggcaacgcgtcggtccctggacacgcccacctcgacgatggtattgaggtcacgacagctgaacccgagcctgagcgccgacggcggcaagcccgagaaccagcgcgagcgggagcagcgtgacgctcaacgccgacactgaggggaggcaggtgcagatatgagtggcagggcgacactcaacccgccccatggcatggaccatgcgtgccttcgtcctgacgtcgacaaagccgaggtctgtttttattggtagttttagtttttattttcggggattaggcgtcgcgatagcagcctagacacttgtagtttaactttgtgaaggcgccaattccgttgttttatcaacgttttacggctatcttgaagtggattgttaatcgccgtgaggccaccaaccaaaccatttccttacataccccggacagacgcatacgcacactcaagggaccatgaaggtgctggtgatcaacgagggctcgctgagcgacttcgaggtgctgtcgctcatgcaggagcgcaaggagcagcgcctgcacaagtcggccatggtcgagtacgccgagcgcaactggatggaccacaaggtgctcaagttcctcacgcagagccactcgcactgctcgacgctgagctcgagctgcatccaggacttcctcaaggagctggcgcaggccgagctgccggcgctcacgtccgccgagaagctgcagttcatcaaccacatccccacggagctcgtggacatccacctcatcatcgaggactgcgcaggccgcttctccgagacgcaggtggacgagctcatccgcatcgtggagcgcacactggcggcggagctgttcgagcagcggcggaatgcagaggcctcgcaggcgacggaaggcgcaggcgagaccgaagagtaggctggcagccatacgtaaaatatagacgaaatgcacggcgttttgagttgcatgaagctcgccttccgctcgttgagcccccaccgagtcactacgaacagaatgcaagcatcagaaagatatctgctcggataacaaccccgtcaagtgcctacgaaacaagctcctaacaagaatgctgtgcgatcgatcacctgcgtcgaccggcctcactggctatggcatcatcttcaatcccttcgtagcttgtccgacaacctggaagtgagtcccatttctcctgaagttcgcgatcagagcctgtgtgcacgtgaaggtgagtaggaaggtagtgttggggcggctcgaggcttactgggaactgttggcgcgcgcggtctggacggcggagcgggcttgcgggaacatgccgacgtactcctgcgacgacaagtacctaacactaatctggcgcttgttgaaccagcggccgtgcagcttcttggcagcagaaactgcagcgctcacgttggcgaacagcacgtacacgaggccgccttgcttctcgttctccacgtacgtgtgcagcacaggtccgtactgcccgcactcctcttcgacgtcctgctggatctccacagcccactccggattgccgctcttctgctcctggtacacatcgaacatattcttcaccacgaagcaaaatgactcactcccttcaatctccgtcgaagacatcagcgccgctgcctgctccgctcgctgcgcggctgttgcggccatggtgttggtgtagtcggtggtggatgccgctgcgggatatcctccaatgccaccagcgctgccaccaatactcgtagggaacaggttcacgtcgttgccagccagctttgccattagcgctgagcgtgactgtgcgttcatgctgagtccggtaccttcgtcgtcctccagcttccatcgtccgcctgaagcaccgttgtctgcgccgctgccacctgctccagccattcctctgttaccgccattcatcgcattttcgttcaccgggcctaaacgcaggtagttgcccgccagctccagtccgttgcccttcgacaacgcgaagttcgcttcctgcgggctactgaactggatgaagctgaagcccttcgagcgccccatttcatcgcggttgatcgtcaccgacagcacctccccgaacgactggaacacaatccgtaaatcgtcctccgtgatgttcgtgtggaggttaccgcagtagatacggctagctgcagacagcgcagatgccgacatgcctccaccagcaattgcaccagccagtcccgcaccaggggcgtcggcagtcagaggagccgtagacgcagcagcattcataaccgagtccttcttggcagcaaagttcttctcggcttccgacgccttgatcatgatcgggaacacctggaagtccggcacctgtccgttcagcagcagcaccttgggcacatcttccaaattcgacagctccacgtacgcaaagcccttggagcggttggtgaacttgtcacggatcagcagcacgttctccaccttgcccgtcttgctcaagaaccgctccaggtccttctcgcgcaccttctgggtcagttggcccacgaacactgtgcggtggtctctagtaagctccatcagctcgcgctgcttggcgcgctcagcgcgctccgccgacgtgctgcgttctctctcctcctttttaggggcagagcgcgagcggctcctgctcttgtgcctcctcctggacgggcgctccctgctgcgactgcggctgcgtcctctgtctcgtcggctgccgcggctgcggcgtggagaccgcgagcgggagcgggggcgacgagagcgtcgccgagacttggattgggaccgcgagcggtcgcgatgacggcggcgcgagtggctgcggctcctgctgcgactgcgcgtcctgctacgacggcgagagcgacgcgacaattcttcctccggtctgctgtccttcttggcattctccgcttcctgataaataaaaagatataataaaaataataaaacgttagaaaaaacaataatgatacattgcttcatgacacgatatcacgcgcaatactgcggctatgcgagccgccgttgcatggttagaaagtgcatcatctgctgtgtctgctgcagtaccttggccgcggcctggatgccttcctgcagcaacgagtcgatggcctcgtccgccatagctgcgcaatgtatccaatcgctggtttcctgaggggcgcgcgagcaaacaaactgcaattcattcatttggcgccatgcgattcaaatcccaccatcccgcatgctcccaccctctatcatacttcattcttcatgtgtccacacacaaacttataccaaaaagtgtatccatctcacactcacactcaccccctcatccacgatggctaccgagatggaggtgctgcgcgccgagggcaacgcgttcttcagcgccaaggacttccgcgcggcggtggacaagtacacacagggcctggacgctgcgccgccctcctctgacctctctggagacgacctgaaggccgtggaggcccagcgcgttctgctgtggagcaaccgcgccgcctgcctcctgcagctcgaggacttcgccgccgccgagaaggactgcacgctggcgctggccgtcgagccggacaacaccaaggcgcgctaccgccgcgcgcaggcgcacatggggctgggcaacatgacgcaggccttcaaggacgtgcacctggtgctgcagcacgcgccgagcaacaaggcggcggccgcgctggcccgcaagatccaggagcgagtgcgcgaggacgtccacggcgtgcagaaggcgctggacgccattgtggctggagttcatggagagtccggacaggcgggcgtgaaggaggtgctcagtgagcaagagaagacggtggaggcgctgcagtacctcgagatgaagagcgtgaccgaactgacgagcttgccagaggagatcgccaagagagagggactggtggtgctctggagagctgtgagtaagcttgtggagctgagtggggccgaggaggagcacaagacggagctgctggacatcttgtcgcacgtggcgtcgctgctggcgattctgtcctcggcgtcgatggagctagcgggcaggacgtttgagacgaacaattccgcgttggatgggctgctggagctgctgcacaagcaggtggcgttggagtatgaggcgaacgcggcggtgcagatgccgattcgcggacggaaagtcattattcggttggcagcttttatcttcaagtatctgctgatcgcggccaagtcggacgacgatgcgtgtgttcgtcgcgtcctcggaggaatgctggatggactgcgtagtcgggagcgcgtgctgcagattgcagcgcttgatggtctgctccacttcatctcggtactgggtggccaggcgtctccggtggcgaacaaggacgacagcgctgctcagcacctgaaggcgcgattcgcagcgttggcgcaggagctaggtctgttttcgctgctgcacaccactgcatccagtgctctgcctgggtttggtgctacaggcccggcgcctgctgaacctcctagctctgagttgactgctgtactgctgagccgccttccgctggttttcacccaatgtctcgcgcatttcgagggcgacgatacaatgctaaagaagatggtgcgggattggtgcgtgtcgcctgtgctggcggcgcggcctacgaaccgcacgcagctggctcagggttctgcttcgtgtctgctgctgtcggctttgttcctctcaaacgcaaagcttgcgttgtgggctgtccagcagactggaaatgacggcacggcgttcctcacgcgacttcacgagtttttgagtgcgtcgcggacgtttgaagatgccaaggcgcacacccgtcaactgcaggagatctgggtcgactgcgtggccagcatttgcggagtggagcatgggcctgcttgcgttccgcctacattgagagttgagatctaccgcatgctgcaggcgtctctggatgatgaagatgacttgatgctccgtgccagcgccttgagtattcaggtgaagctcggtattgtcgagaagacgctggagatgccgtctgcagatggacagttcctcatggacagcgtattcgaagtgcttgcaagtgcggagacggtggagaacaaacacaaggaggcggagaaagcgaagcagagtaaggacaaaaccaagtcggtgcccagatcgcagttgttctggagcggtgtttcccctaaggagcgcggtatcgaagcattgtcgtatctgattacgtacactcccgtgaaggacgctttcgtgaagcacccgggagctgtggctagtgtgtttcgggtggaattccccaacatcaaagactccagctctggagcgcagtcgagtgcaggcttccgatcgaatgtatactacggtatcgggtacattttgcatcacgtgctaacgtcggaggctgctatcaagcggaagcaaatggagggaatggagatgacggcagatcagtacgaggagctgcagaaagcgctgaaacagaagtctgtgctggatgacggtgacactccggaacatgtgcaggctcgtgtgactcgactagcggcgtcgcgtgacgtgttgactacgctggtgcagctcttgaagctgtccgccacgaagtcggaaaacattatggagatggcaacacttagcgcgttgcacgctgcagaagcacccacggtgcgaggtaaccttgttcagtgtggtgtgttccaggcactgatcccgttggccctgcatcacatcgccgtagccaatagcaagggcacgaaggcgggtgggaagcagattcacggcacgaagatctcgaatgctgccgggcaggccatggccaagatcctgatcagtaccaaccccaacttgatcccgtcatcctcgcttttctcgtccattcggccgctgctggacatgtgcaagggcgaccagcagctactgcagttcgaggcgctcatggctctcacgaacatcgctagtgtgtcggaagaaacaaaggcgcgtatcgtgggcgagccacaggggctgtcgacgctgcagtacttgcagttctccgagcacgagcttgtgcgtcgtgcggccaccgaggcgatctgtaacctgcttccgaacgacaaggtgatcgagcaggttttcatgaacgaagagaaggtgcgcttgtggatcgcgttcgcatcgcttgaggatgaggccgaggactttgagacggcgcgggctgcaggaggtgcgctggccatggtgtcccaggtcccgcaggtcagctgggtgatgatgcgtcagggtggactcaaggccttcaccgcaatcatcgagcaaggctccaacgttgaaacactgcaccgcgcgctgttcgcaatgcagaacatgctcgaggcaattgctggtgctgcgaaagacgaggagaaggccgaggagcggaccaagttcatcgacgaggtcaagcaccacagctcattgctgaagcagaaactgtccacccacagcagcaacgctcagatcaaggacaccgctcaggcatgtatcggagccttagaacaggtgatccgctagctagctagctggagaacaacacaacactgtagaaagaaaagagggtttgtctgaatgaatacttgtacttcggggagcgctcaatggtcgactttgatggctgaaggggagatcgccgcgccgtagaccgtcacgatgcagtagatggtgctgttctcccagagcaccgtgcagtagccgtccatggtcgggtcccagaagcacgcagccgccgtggtcatccccgcgccggtcttctgcatgatgaggcacgtgaccgcgtacttgaaaggtttgttgaggttctgcagccccgtgagcacgctcgcgaccagcgtgttggaccaatccatcaccttcttccggttgtacaccgtgtccttcaacgcagactcgatggcctgtacgcagcaagaagtgtatacgatgacacatccgaagcaatatcaatcgtagaatccctgaacataccgtcttggcgatgggcagcacgtcctcctgcgagaactcgctctacgcagcaccattaccatcagcagacgctctaaacccttccatccacagccaacgcctctcattgtacctcgttagtgtccatggttaacgacgacgtctacctgactgatggatacgccgtcctttcacagcgccccgtaattagtcatcatcccgtgccacaccacgtacacagcatgaaactgtccaaacaagtgtctcgtcccttccacacgttacgtttcaacacgcgacggtttccaccggacacgccgtccaagtcggtcagcgaacctgcacatttctattgacgacgcaacagggcgggaggctatacagtattatagtgcagcagcatgagtgacgactcgatcgcggtgcagcggctgcggcaagagcgcaagaactggcggcgagaccacccggcgggcttctgggcgcgccccatcgccaacgacgacggctcgctcaacctcatgatgtggcacgcgggcatcccgggcaaggccggcacggactgggagggcggcgtgttcaagatgtcgctggccttctccgaggactacccgagcaagccgccgctcgtcaagttcacgccgccgctctaccacccgaacgtgtacccgtcgggcacggtctgcctgagcatcctgaacgaggacaaggactggaagcccagcgtgaccatcaagcagatcctcaagggcgtgcaggacctgctggaccagcccaacatggccgacccggcgcagcgcgagccgtacatggacctcaagaacgacccggagctctacaagcgcaaggtgcgtcagctggcgctcaagaaccgcgagagttagaacgttgggagggtgtggtaaaggagatggagacggtaggaacgacggagagtaatacagttggaggaggaagggggtgtcattgacggtagtggtagttattgtggcgcctacttactcaaagacgggaagagctgagaaactcgagtgacctcagctcgggcctcctccccactttagcacggaagaaggaagacgactgcgcagctctagtccttcttgagcgcgaacacctccctggcaatgcccgaagccttaatggtcaagatctccacgctgtcgcccgtgtaaatatctctctgcaaccagaaacacacgtaggcagttagtagatccgcttcaaaccagcaactccagcagttggttgcagcaccgcacctctccagccgtaatgaaggcgtccttgatgatgtccttggtctcctgcagcgacagcgtcttcttggggtccgtgcgcgtgtcgtgctccacgaggttgtccagcagcgggatcatcaggtggccgccgctgccctgcgccgcgcgcgtgacgcggtcgtacgagccgatggcgtcgtacgtgtacacggcgcccttgccgttctcgtcgatgccgcagaggatgcagaaggcgtagtacgggaagaagcggcgcgagtacagcgtgttcatcagcagctgcgccatggcgctcgagctcatggccgtctcgttgtcgtgctggtacatctgcgcgcggatgctcagcacgccgcgcagctggatgatgtcgttgtgcgacccggggcagcccagcaccgaggtgggcgtcagctggtgcagcttgctctcctcgcgggacagcaccgagtagcccgtgctcaggcgcgtgtcgcccgccaccaccacgaagtcctcgcccgcgatggccagcacggtgccgccgttgaagtcgtagggctcccagttggcgcgcgcctgctcgtgcacacccgccgcctgcacgtcgcgcagccccagcttggcgtctccgctcgtcgtccacgccacggcctccggcatactgcgagacatctctgcttggtaggggtaagctctaactagaagaagacgttggctcgatctttatgacccgaagaaatcttcccctgcggccgcatttttcgaggggggtcgtcactttatcggggattatacctcgatcgagtgacgttaaaccggtacatacgtttgcagtcaccgatataccggtaagatgttgtctggctggcgcgcgtagcgagggctctctcacacattcctgcggccgagagctgtcaacacccgagcgaggacctcctgcacctgcctgcacctgtagccgaccaagatggagcgcgagccgtgtcccttccgcatcgtggaggacgcgggcggaggtttcgtgctgggcgccgtgttcggcagcggctggtacacgttcaagggcgcgcgcaactcgccgtcgggccagcggctgcgcggcgccatctacaacgccaagatgcgcacgcccgtgctggcgggcggcttcgccgtgtggggcctgctgttctcgagcttcgactgctccttcgaggcgctgcgacggaaggaggacccgtggaactccatcctggccggcgcggccacgggcggcgccctcgcagcccgcgccggcccgcgcgccgccgctggacaggcgctcatcggaggcgtgctgctggccgccatcgagggcgtcagcatcatggtcaacgagtggttcgcgccgcagcccgaccagggcatggccggcgacatgatgggcaacccggagctggacgagcagaagctggcgccgccgtcgttctaagcccacagcgaaaggagcgagcgacgcggccctttgctggccggcttttgtttgttaaatagcgaatggggtggccccactacatgttgctgccctccttaattataggaaggacctgcgctcccggatcgatcggatctgggccgaggatacatagagacgggaaggatggagggtggatggagggcctgcgagcgcgcgcgccggcttgaagcggagctggcgcgaggcttgcgggcggacgaagtgcaaggcgagaagacgcgagcggaagatgtcgacggggattcgaagaggagagaggcagacagacagcgataaccgacgcggagacggaatgacaatgtaaccttagacgcttcagcgagcttagtctcctgcgccggcgtggcgatgctgctaacagggagatggagtgcgtgtgctttgattgagttctgttgttgcaggtgaatgttgtggagtggaaaagtagagctcgttatttctgtcggagacattgaaagcgctcgacaagaaaaaccggtggaaacgcacgatagcatggcgcgctgaaacggacttggaggccaggacagcaggacaagcaacctcggtcagcaagttccgatcgacaagcggctcgatactgcaacaacactcgtagctcggctcgaaagaagcccaaaggagcagaagcgtactttccgaccgactgcgggtctcaagtccgtcaagaaggcagcgatggccgagattagttactacgatgcggacctcagcgacgcgatcatgaagctcaatgagctcatgggcaaagtggccaaggcgccgcctggtgttcgccccgaggtacggcacagagtggcggccgtgacaagcttcgcgaagaaggttaacgctttggtactgtgcagattctcgcgatggctgaagtgaagctcaaggaaatgatggagctcaagaaaggattccagctggcgctacgacaagctccgcgtgaccaagttgctgcctttcgcgaggttggtgcccgctgagagccattttcatcgccgtgttattgacttcgtcctttatctttgtgcaacagaaattcgaggagcattgtgctcgtgttgaagagctctcgagtgaattccgttgggccaaggctgagcaggagcgcaatgggctgttcggcgatcgagccgcagcaaacgccgcagctcgcgggacaaacgggctgggaaacaaggagttgctcgataaaactatggacatccaatccaagacagagcagagtctcatgagcacggcgaagatggtggagcagtcgaaagaggtcgcagcggcgaccgcggaggttctgcgcggccaacgtgagcacatcgttgagatcacggacgccgtcatgggcatcgaagacagtttacagcgcgctgacaagctcatccgttctttcgcgcgacgaatggccacagaccgagtcattttgctcttcacttttctcgtgatcgtcggaattgctggcattgtcggctacaagtctgtccaccccgacgacaccaccttctacgtgccggatgaggtcactccgccggatccgacggcactctacaacaccacagtgaacgccatcaacagcacgctttcagggtcctgaacgttcggccagttgcgtagctatagcgatagcaccattcagctgttctaaccccccgtgaaccaatttgtttaacttcgagcctgatttttcgtatcacttgcactaggagctacggtcatctgatccagagtcatcgttgctagagtcggattcggattctacttgatcagagtcatctccactcgagccgctgccctcctctgattcctcaaatccctcctcaccttccgattcgacatgtaagaaatccttcagctggtacaagctctgcagcttggctcgatggcctgctttcttgatattcatggcgtcgagcgtcttgacatcaagcccaccagtgccaagcaagaaattcgcatcgtcaaagccctcatcgaagaatgttggcgcatattccacgagcccgatgctggccagccagctcgcaagttgagcccgaccagaagctcgagtagcatggtcgactagaagcgatttcaggtcgtcacgctccagctccgtagccaagtcaaccggtgtcgtaccattcttcatgccaaaacacatacgatcagcaaactgtagcaggattttcagcgctgtatccataccttggactcgagctgttggatgtcggcatcttccagcaagagcttcacgatggctctgttaccctgcagaactgccaagtgcagtggtgtgcagccaatctgcaaaattcagacccaaaccgtttaaacatggtaaggccagacctcttataatgccgtacgtacctgtagatcgactgcattcactttcatagccggagttgctgctagcagtagcttgacgattgcttcgtgctcaaagcgcacagcaatatgcagcggcgagtacgcgtacttcgtctagacacaagctccggaagttaatggtcattggaactactgcggagccaccgacctaagaaacgacttacattgcccagagcattcgcagactcagggttcgcagctatcagctccgacacaagctccgcatctcccagcgcacatgcgtactgcagtggcgtccacgctaccgtatcgcgcggcgatcccgcctccaagcggccgcagcccagctcttccaccgacacccccaaatcctccagccgcgtcgtcatctttgtaaattctgctcaagcgtcgcagcaagaagatctaatgggctaacaccagcaatacttacacactcgagcaccatccaaccaaaatgcataatctattcttctcctattgctaaagtgaggctgcgatcgatctactactgtacgaccacgtgctctagtagaacggccaggacttggtcacgatcagcgtcaccgctgtggccaccacgactactagcatcactgcgatgggctccggtggcttgtacagctcgcggaagcgcaggttctcgttgcgcccgagcatgcggcgcttccgacgcatcgcggcgatgaacttgtcgccgagcgtcttgcgcgtctcgtccttgaaggtgaagcgcgcgcgcatctccgcctgctcctgcaggaacgccgcgtaggctgcagcctcgtccagatcgtccacgaggtcgtcgccttcgtcgtctccggggtcggcgcgctcgtcgtcattgctcagcaacgcgacgccgctggaagatcgcgccttgacggggctgcctcgtcgatacgcgtgcgtctgcgtcgggtcatcatcgtcttccggactcggaattgtctcctctttgccgcgaggcgtagagggagcgtagggcgctgctcgctgcttgatggtcgccatggttgctctgcgtctcttgaaggcgaatggggcgcacttcaacgtcgacacggtaacggctccgcttggcgcaacattcgagcgaccacttctcttcataaaacctgcaaccgtaataccgacgtttaccgagtatacagtcgagctcagtgtatcggtcgtaacgctttaaacgtatagcctctgtaaagagtacagattttaagccgatatgctcacgaattactgtaaaatataatcaacctgtagaaaataataaactactgataatcctatcaagcaagtgcatactgtacgtgtaagcgaggtcgaccgagaaccccacaaccggaacgagacctgcagacggaggagaccagcagtagcgagcgagaatgccgagtgccaagtgggagatcgcgcgcatcggcgtgtacatcaccagtgcgttgtccgccgtttgtagcgaacgatgttgatgatggatacaacgtgctaatgagtgcactcctgtgtcgcctgcagtccccgtcgtcgccacctgcatctacgcgcagcccgactgcatcaacttcatcatcgacagggtgagccaggcctgctgcttccgtgtactgtatgatagcatgctaatgtctgttttattgtagtggcggtacatccagtacccgccgcaggccgtgactcgcgaggattactacaagaaaatgcgcgagcttgccaaggaggacaagtaagctgcgctgcctgcagcacagactggatgacagaacttcttcatctagtgctgcttgcttgaagttgcactgccgtgacactacgaagcagaaaaggaaacacctctttaatataaaaggccaaaagtacgttgtatttgctagagtggcggcacagaatggatcgtggcgcataacaagagcctctcctcctcttcacgtccagccgcgcgctgtctatacgagtattcgtgcttcacacggagtcgtcaattggtgtgtgtctcttcacatacttcgccacgctggggcagttccgctgcgtgtgctggctgctagcccgtcgcatggaagacgacacgccgagctgagctccccacaacctgtttactgtttccggagcaggcagtagatccgtgtgtcgttgtgaatcatgtgcaggtggcgctgctcgccgcgcaggcacatgagcaggccgccgaagctggcgtagatggccaccatgttgccgccctcgtggtcgtactggaacaccttgccgtacatgccgtagtcgtaacggtccagcagcgtgggctacagcaacaccatagctacatcagcacaattccctcaccaactgcagcagcaatgcacagtacacaccttgcccgactggttgaacatgccgtcgtccggcttgccctccaggtccagcgtgctgacgagcgccagcgtgaacttctcgttctggcgcagacggtagacctctgagttgatgtccagcgtcagctccagctcgtacgacacacccttgcacaccacgcgggtcactgtgccaatgagcaatagtccagttagttcattcagtctcctctcccacttaacgtagcagcacacagcgccagcgcatggagcagcgtcttgcacgcacctttgtcgaacttcttgccatccgggttcagctgccgcacctcgaagatatcctcaaacagctcggtcgccatggtcttcgcttctcctcgctaccggtatcacaatcagaaagtggggcgtccaccattgctttgctcttgtgcgttttgtgtccgccacacaaaattatatactgtttgtgtgcaccacacgaatgtgttagatacatcacaaacccacgaccagatggcttaaccgacgctcgcctccgctccgtaacgacaaaggccagagccagaagacgagaagagataacagggaggaagaactccttcgagcgcagcagcacacacacacgtatccacagcactgtagacaggcatggcgtcgccccgcgaggacgagtacgactacctgttcaagatcgtgctcatcggcgactcgggcgtgggcaagtcgaacctgctgagccgcttcacgcgcaacgagttcaacctcgagtccaagagcaccatcggcgtcgagttcgccaccaagtccatagtggccgagggcaagaccatcaaggcgcagatctgggacacggcgggccaggagcgatatagagcaatcaccagcgcgtacgttcacccctactcaggctacattggagtgggcaatggatcaaggctaattattgcgttgtttattattgtgcatgatagatactaccgcggtgcagtaggcgcgctgctggtgtatgacattaccaagcacggtacgttcgagaacgtggagcgctggctgaaggagctgcgggaccatgcggacgccaacacggtgatcatgctggtgggcaacaagagcgacctgcgccatctgcgcgcagtgtcgaccgaggaggccatggcgttcgcggagaagaacaacctggcgttcatcgagacgtcggctctggaagccacgggcgtggacacggccttccagcgcatcctgaccgagatctacaagctcatgagtcgcaagacgatccaggcggaggagaacgcgaccgcgagtctccccacgggcaacagcatcgccatcacggctgagaacacgaccgagagccagaaaaagaagaagaagagcggttgctgctaggcttgcgctggggacacccggcgctaattgaagtaggtgagctgattaatggagagactgctgatagtcaacgcgagcgaaaggaaagctcatgaatgaccttcaatgcaatcggctttcaacttgacacgcacgacgcacgaacgtcggaaggacgacttcggtagtcaaattgcgatttggtccgatctccctactgtatttttaggctttagtctttagtcctgctatctgtgatttggtctaacctcattttatagtctttagtcctgctatttacgagttagtccagctctatagttttggtcgtcacagaaaaaagcagcggagcactttcctaaccaaacaccgatggccaacaagaagaagcgaagtcgcgctcaagccgccagcgctgtacgtgtgcgcgcgaacgcccgccactacaatgatacaatctgtatactcacatttatctgtgtatttgcaatgcattgcggcccaataggccgatgtgaagcctgcgcccgagcagtccgagcccaaggccaagaagaagcccaagttctcctttgccaagacgctgtcgactgacgcggcggctgccagcaacaccaagaagaccgagcaaccaacggtgaaaaatacagtggagtcagctgctgctgccgacgcttcgagcgctgtgaagaagaagaaaaagaagaaaaacaagaacaaaagcactgcaactgcgacctctgcagccaatgacgcggacaagaaggaggccaacaaggccaaagccagcgagatcgacgacctgtttgcgtccttgaagacggagaagcagaagaagagcatcgcagaggagcagcagaagctcgccgaggaggaggaggagcgccgcgagaagaaggagaaggagcgactgcacgagcagatcaagaagctcgaggcgcagagtacgtcgcgttatcacttttgggagataaaacattgggagctctgactgatttggattgtttgctggagcacagataccaactcgaccgctgtcggcctcaatccggacccgcgacctggtaagtccatggcttcaacgtggttgatggctatggagcttcgtccggctaacctttgtttttattgatgcgtctttagttcgttacgatgaggacggactgcccatttacacggaggcctcgctgcagatcggcaatggtggcaacaccaaggactgcccgttcgattgctggtgctgcttctgaagcccctttaacactttaacctagacagcttttcgcagctcaaacgcctccgcctggaactggagaaacctgtctcccccgttccctcactgcgcctcttggttgatgtcgagaaacaccaacgacaatcctccaattccctcatatgctcgtcaatccactgcttagtatccttcggacagcgctcgatggcgtcattgatgcaccttctcgcgcgttcgtcttggaactttgtatccaccatagaactccaggaccatctttctgcagcgcttcaagcacaaggtgcctccgattctcttcagatacccaccgagcgatctcaatgtagcggtattccaagaccaacgttcttgctgctgacatgtcgagcggcggtccacgttgaaccaaccaccgcaatagtcgaatactctcgggggtgatgtatttccctccggcgatcttcaccaactccagtgagttctcctcatagccgtgcaccgataaccaacgaactacttcgagatgacctttttcaacggcctgtacaagcaacgtcgggtctgaaaccgcaaatctatgctcgacgaaccactgcaacatcttcacattaccgtcactgacagcgcattggagaggcgaccatctttagccgccgttgtagcatccacacgtatgccatgctgtcacttattgtgcacgctttcttaaacccactcgacaagctcgagacctccactgttgaccactttccgcaaaacttgtgtagaaacaacatgaacttgatgtagccatttcaccaccttcaagtgtggcttccgcatgtactgcgttgcatgggactggggggtttgagtcatgaaactttcaccgctgcttgcggggcgggcgcgtcgcaacacaccttggagtacgttcttaggaagactggccccctttgggctggttacaccgagaagagtggtcattgcacgggtgaggcgttggatctggcagcggagcacggacatttcgaggttgtcaagtggctcgataatactcgagtgcagcgcgggctgtagtgcgatgagcaaagctgtgaagaagtgtctatcgcgcagtggcttcataccgtcaaaggagtagtgtgctcagctgaagccattgacaaggcagcccagaatgggcacttaaatggctgcaactgaacaaccttttcatgtgttcgtgcgatggagcggggagacggtatttgtacacgacaaatgtggctgtgcggacgcaggacgccagcggctacttcatggctaccgagaaaattcagatgtggcaactcagaagtttttcagtgaatcggatcgtcatgttcattcaatccgtcagtggtgcaaccacagcagtgtgaattatactacttcactgcaaccgtctttgcttggaatttggcagagccgtctcctcgtatccgccaatactcatcttggtaggaaagcaccaacgacaggcccccacttcactcatatcttcctcaagccaccgctgcatatccgtcgaacagctttggatagcagcacggatatcccactgcgcgctttcatcttgaaatgtggtacgcgcaagaatccaccgtaaaactcttctgtcatttttctgtagtgcctcaaacacgacgtgtttccggacgtcctcagatacccaccaagcgatttctacctggcgatattgccagattaacaatgtcgctgttgccaagtcgagcggcggtccatgctccactaaccaccgcaatatcggcacgttccttattttcccagcaatattggccaaagcaagcgagttcacaccgtatccgtgctccgaaagccagcgaacagcttccagttggccgcttttgactgctaactcgagcaggtctggatctgaaatctcaaacccattctcggaaaaccagcgcaacaccttcacgccgccgcggctgacagcatcgcgaattgggactgtcgatcgcaactcgattccaaactgattcacccagtccagtactgcaatgttgcctctactgaacgcggtccacgctaaacatcccaaacaacctcgaacaaaatccggacgctgctcgaaaaccgtctgcagcatcgtcaattgatcgctagtcgttgggtttgaacgtcgctttcctaggacatcggggctgaagtggcacattacttggatacttctcgcttcatccattttaccttttgagaagccttccctcctatgctcgagtagatacagaaagacgtcgaggtggcctcgatcagcagcgaagtccattgcatccgttgtacatccttcggggcgattcttctgcagccaccacacaacatcgagatgaccattttgtgcagctcgatccatcacctcttggacaaatgtatccgggtgatgcatgtggaaccattttaggactttgaagtgtccataccgtgctgcgtaaaacggagccatctcggagcacccctcccttcgattctcgtgcagccacgtgatcacatccatgtgtccattttccgccgcagcgtccatttcatgctgactgaacgaccccgggaagtgttcgtgcacccattttaccacgtccaagtgcccaagttcagccgcagtaactgcatccatgtatggtacgtagcgatgacatttgatgtaaacatgttcataaagccactggaccagttcaaggtggccattgttgaccgctacatacagggccatgggagaacaacacccgtggcaaacgcgatgtagccatttgacaacctcgaaatgcccattctcggccgctttgttcatagcagccgttgtgcacattaacaggttattcgagtggagccattgcagcacttcaaggtatccactctgagctgcaatgtcaacggcaggagcaagacacgtctctcttttcacgccatgcaaccactgcgcgatcagcttggtttgctggactaccgtcgctgcaagtatccgttctattgacataaatccacttgaccacctcgaagtgtccttgttccgctgacttattcaatgcacctgccgtacagtgttcaaacagccaattcttctcaatgtacccagctgacgacttgtcgatcttccagagcgagtgccagtccattccccgctcaaataaccattggacaacatcgagattcccgtgagttgctgccagctccaacatgttgtcgaaatctgctttccaaggtccgcggacgtcctcgcttccagtcatccagcgaagtacgtgcgtgtatccgcctcgtacggcggcctgtactgcttccttccaaataggtgctgttttcgctaggatatagtccaaagtgggctcggaggcgccgccctcgcatgctgcgtagaggaactgtgagctcaaactcccactcaaatagtcatcaatgcgttcgatcacatgcggaagcgaatgtcgtgtaggaacacgcactaaattatataacatcacactttccccaccaacaacacccaccaagtcccgatgactcaatgggcttgttagggttagaaccggaaggcccaggagctttcccttgcaccgggttgatgtttcctctgtgcaccgtgtttccgcttagtcaactgacggaaaccccagcgtcaccagccacgagcaaaggctggcacgctctcacacacaatataaacctcgcaggccctcaggaaggaagggtcccagccagtcacggcttgatacgagggtgccggagctatactccggcgggaaggataaatggagtgcgctcttgctcctccactacacggcgatgactcgcccttcgtatacacggccacctcttctcttctcttggcctgaccacgggtaaacgcacgctacgatactagcaggcgcgtccaccgacagccataatcctaccaacaggtttatccaattgctacgggaactcaccgatagcccggacgtcttccttgagtggttgggaggaaaagctgttctgttcttgttgcccaaagggcttatctgttctatcttctctttcctatggttcaatacaaatatctagtataaacgcgtccgttttggatcttcccaagtaaccaccgacccttcagagccccctcgacgccccaagaggcctctcgatggctctattggacgatgaaggggttccctgacttggagcagtcgccagggatcgaacggtcgtcttaagtgcagatctcgggtcaaagttcgctgtaggttcggatcgtacttgaagtcctggatctcgaacttgggtgtcgacgagtcttcggcaccggtccagaatggccaatcagcatccgccgaacattgctgaacatgtcccgacgactcgggtcgccactgaagcttggtcgtcagctcgattctcgtttaccgccaaatcactacaccacacgaacctcccactgctgggagacggttcgtacacacgaatcgcgtggcttggcggatgcacaggctcttcttcatagcagctggaactgaggcttagtgaatggcgacacagtacaagtcggctttgttcaatcgtctccagctctttcatgaccctacaatatgacttctaaaatcaacattctcgatgtaagtacatatcttcatgattgattgagttgaatgacatagttttttcgggtaaatatggtatcgccgctctaatcactctttttgtatgtatgtgtggatgggtggaggggtgtggggggctattgaactgagtctctgggacttgaaaaattgcaataatcacaaataccgtagcgctgtagagaaagttagcccgcgcaagaatcctaccatagaacctctcgatcacttctgctcagcgattcaaacaagagtcgtctttagctacccatttagcgttcttgatttgatattccagaatcaaccttgatgccgtggtatcatccgttctgtgctcgagtagatacaggaagacgtcaaggtggcctccaacgtgcattgcatccgttgttcatcattcgggcgattatcatccagccaccacacaacggtgagatgaccattttgagctgctcggttcattgtggataatgggtgtggacccatttcagaacttccaagtgtccacatcgtgcaacagttcgaaacaaaacgtcgtgtagccgctgctgccatttcagtaggagcacttagccactcattgttggttttcttcatcaagaagacaacacgtccgtggaactgcatgttacacaacattattgtcttgatcctttcccttgaaccgcccttggctcaagcgtgctgctaacatactcaagagaccaacaaggatagtattgctaaagagtaatgggcagacacgaccatcttggcgaaacaatggagaaatatccaagtaaggtgccactttggcatctgacaatattgcagagcagcgtccagattttagttgagatagcttgccctgtagtagcaatgaccgcaggctccgactcgcttgagatggagaacgtggacagaagtatgtagtattgcaatactggactgggtgaaccagtttggaattgagttgcagttgacacccaactcgtgacgtggcagcgtgaaggtgttacgctggtttttcttgagattacaaatcccggcgctcaactggaagcagttttggaacacgggtatgatgtgagcttgatatagtcaaacttgcgggggaaatagggaacgcgccggtatagcggtggctggttgggcatagaccgacttttggcttcttagagggatgtccagataaaaaaagtgatagcttattggctggctgacttcttcagtcacagtgaaaaagaaagcaaaacaagtcggcgttatgtccaagcctggtaaaagtcatccaaccgactttttcgctgtaacctacggaatatcatactgcaacattcttttagagaggttgtttcctcggagtgcgggtgttgcctgttgcctaccgactgcggtggcggccacttcagctcgcagtagaagccgaaggcgacgcgcacagcctcattatgccaacccggaaggctcaagcaactagatccggcctagtcgggacgacaaagccaccagcgtcagcaggactaccggcctacaacaccgagtaccaagaagagggaaactcgcaaaacggagtcttctgataattcaccgtcaagcactggaacgcctgggcttcgtgagccccccttgaagagaacgagagtctcacgtcacacaccatctccgcaggaagaaaccgtacttggtgcgattgccgtcccagctaccggccacgttgcagcatcacggccaaagcaactgggcgcagagccgccaagaagaaggccaacagtcggcgtaaccagtccgacccgaagaactccactcgcaagaccaccaaggtgaagacgaagccgacgtcgggtgacacagtggacgcagatggcgccgccaccacatagcccaatgcaagtaagcaaagctcaaagaagtctacggcgtcaaaggcgaaggtgaaggaagtgcagagcatgcagtggacaatccagctgacggctttggcaattgaagcgcgtttcaagaacaagctgattctgtcaaatttcgctgagcagctacaacatcttgtcggggagcaccgtgccggctctcaccgtcaagctcgtgggctgcagcaacgtcccgctcgtgtgcggcatgcccacggtcgacgcctgtagcagcaggaacgttcccctgcaaagcttcaggcaaccgcgcaaacccaactccactagcactgacctgttgggaggcaacataccgctattgtgggctgaaagcaacaccgtctttagccagaagtgcgtcttctacctccactgcggcagccgtggccgccagcgtgacgtctgtcactcctgagctgatgctgccgacgtccatgacgtcaggttcatcgtcgtctgagcgcgctctgctacgcgccattgtggtgctgctcgatactgctttttcaaagaaaaaagtcagatctcccggcaaaaacaggtcccagacctacttcttttcaaatgacttttaagttggcaaatcaggcacctgcttttttatctatcgttttttaaaataagtcggccaccaaaagtaagtgtttttttatttggacatccctcttaaccggaacagcgttgattttcgagtgccgcagtatcgaaatcgcctggtgggtagctgaagatcgaccgaagtcaccttgtacacgagaaaagtttaatggtggattcttgcacgcacgatgtttcaaaacgaaagcgttcacggaacatctgatatgccatacagcgctatttgatgaatattaagcaatggggattgaggaaaatatgggtggagggtggaggcttgatgttggtgcttctcagcagcaattaagagacagagcgagaagaaagttacgtaaaaaatatcctacatgtactacgaaatactttgaagtaataaccacaacaaaggaaatgttttggtgaccctttcacctcacgcctcgcaacgcttgatggatggatgtcaagaaataccaactgcagcccacgacttctctcatatttttctcaaaccattgtttcgtatatccttggcagcactgaatggcctcacggatgctctgttgcgtgccttcgtcttgaaaatgcgtgcgtgcaagattccaccatacaactcttcgatcatctgtctccagtgccttaagcacgaggtgctttcgaatatcttcagaagcccaccacgcgatctcgatgtggcggtattccaaaaccaacgctgttgctgttggcaagtccagcggtggtccattttcgaccacccaccgcaataccggtgtgtccgtgtatcggctgtacatttcttccccagcaatcctggtcaatgcaagcgagtttaccgtatacccatgcgttgacaaccaacgtactacctccagctggctgccttgaaccgccagttcgagcaactttggatttgtaacctcaaactcattctcgaaaaaccactgcagcaacttcacgtcgccgcgactcacagcctcacggatgggctgtgtcgagcgcagctcgattccgaactgactcacccagtccaggattgcggtgttgcccacactacatgcaatcttcgctaggcaccgtaaacaatcgtggaggaaatacggacgcagttcgaagacagtctgcagcatgcagaactcttcatctgttgctcgattggagcgtcgatttcgggaaggattctcaatggataaagctagaagtatccaaatactgtgcacttcagccccgatgtcctaggaaagcgacgttcaaacccagcgactagcgatcaattgacgatgttgcagacggttttcgagcagcgtccggattttgttcgaggttgtttgggatgtttagcgtggaccgcgttcagtagaggcaacattgcagtactggactgggtgaatcagtttggaatcgagttgcgatcgacagtcccaattcgcgatgctgtcagccgcggcggcgtgaaggtgttgcgctggttttccgagaatgggtttgagatttcagatccagacctgctcgagttagcagtcaaaagcggccaactggaagctgttcgctggctttcggagcacgggtacggtgtgaactcgcttgctttggccaatattgctgggaaaataaggaacatgccgatattgcggtggttggtggagcatggtcctccgcttgacttgccaacagcaacaacactgatttttgggcgccgcaatatcgaaatcgcctggtgggtagctgaagccgtccgaagacagcttgtgcttgaggcactggacaaaaatgatcgagaagttctatggtggattctcacgcatacgaactttcaaaacagggatcggacaatatatattggatattgattgtcggcgaggcagtcatcacaatcaatattgtaccaatatcaatatttgccccaatatattgctatacttgcctttagtatggcgatatattgtactgtaccagagtatatgagtacgttgagtaatgttagcatgaatcgtcatggcacttatccccaatggttcgtgagtctttacccctaactgtacgtgtccgaacatgattgacggtcttcctagtgtctaaagcgaaagtgaccagtcagaagcatcgacgagcaatgttggagactcggttggggtacctctccctctttcatgacgtctgttgccaaggacacaagccaagttattatcaccgacgtaggtaccgcagtaacgctgcagctctgaggtctaagtgtctcccctcttacgcatacgaagtcttttcgcacgtagtcgcagtatctgctcaaattacgtatacacgttggtgccattacgtggctgtaaagaaaacagaagtgcagccctgcggacctcaaggatactctcatggagaaaaccatagctcgataagagagcaagtctacgtatacttaattctgttgttcagcgccatcgacccctcgacgcgaaacgtgaaaaaaaactgagactcgattaagtactgacgatggattggggtctgatgaccagcgaagtgctattaaggctgtcagaagtgccgtattcaataggcaacagccacagaaaaaggagaggaaaactagcttatggtgctctttaatattgtaagaggcagtttttcttcctgaacaatattgacaataaatagtggatattgatgacatcgctacaatacaattctctggattttatccagagtccatgggtgaaggccactgaggtgccattattctcacatcaaatacctgctaaatatgggtttgagcgctgctaatgtttatagctaacataccttttatactggatagcctgcgatctaatcaaattatgctgctatgttgacccatccggttgagattaagtcaaattatctattattttacataccctttaatcaagtatatatacctgtgatagatagtttatctgccactcaagcgacatccatcggattttttccaacaacatgccgacgggatcccgccttcaacggtgacgacttattagttaggcattacgacgaaagcatcggccactggcagctacatgattagctatggctgtggcaagagccattatgtccggcatcattagtgaagacccagaggtcatacgactcaggcctcgtgcgcatgcagcttcagcaccggagccgtgaggtgatgccgtgtctcgagaacgcgttccagtaagttgatggggctcggtacccgttcaactcgacaggaatcgtcaaaatcgcggctacatctacgtagacgacatcgacatcgttaagatcgtcggggtcggctagcttgctacaatccccaacttcccgtgtgttatgttgtaattcagtttcttcttactaatagcggtgcaaattctgggcagatgctgcggctgcgaagcaggctcaggagatgcccttgggtcgtacgggtcacactaccgaagtataaccaaatgattttttgtaccttcctattcagtatcaaacggtcttaattcgtgcacttgatcggccggctggaagtacagatcccatcttactcagttagcgatctccttactgcatgatcaccattaacgttgcccagctgattgaattcatgtttagcaggttgtgttttattatggacgatgatatggtggagaatcagtaagcgttggtttgagtgatgttttagttttttttcggctactgtcaggtagtatgtatgtgcaacggctttctgaaaaacaaaatactgtcatttacctatcctagcctacgtgaagccctagtaccgcagcagtacgtccggtaatcaacacctctagctctgtgaatacttagtcgtttcgcttgtggctaaagggagagactatgttgttccttcgtcctattatttcaaattgcacttaaagatgtcagaactgaagtacttgaaaaatgcactaccagcccaaacctctagtgaattgaagaacggccactattcgtataaatccgttaattcaactaatagtggttaccctcagccaatgccatatctctactcctttctgccattggcacgtagaaacaagatgccgcagaacactaacttatatgcccaagagcgacgtaaaatccagagctgttccgggcagagcacggccttgtattgatgcccaacaatattacaattttacaatatcaatttttattttccgatccctgctttcaaaatgagagcattcaaggaagcgctatccagcgctgcggggaggatatccagcagtggattaaggagaacatcggagaaatggaggtctctcgttggtggttcttcacttcgaccaagaagcgagataaggggaccgacgagacaaggcgcaggagactgcgggtgcttattgcaagacccacatcgatattcttgacaaacccaataagctgaggttaaaacctaatacactaatgattctgtcgagcgctggttgaaacaccgttctccaatggtaccattgcaatgaaataactaaggatgaactaaaatgtgtactgtgtaagtttaccgctgtactcaactacgtaatggtggttagtttagctggagctgtgccttgcatgctcacgggcgggtgtcctccaagatagctggtcaagtctacgcgctcgataataatacctcgaaccagagaaaacgacctggtgatcctcacgcctcgcaacggcttcgctaagtgattagtaaatctttttcgtcttcatttcgcgatgtgaaatggcaccaacagcaagattccacatgtcacggcggaacagcatcgcatggcgtcacgaacgtccttttgagcccttttgtcgagaaactttgtccgcgcaagaacccacctttcgatcatttctgctcggtgcttcaagcaagggtaagtgctcgctcgtcctcggctacctaacaggcgatctcgatttgaggatatccagaaccaacgccgctctgtggtaaatcaagagtcggcctgcgccagctcgttccttagttccccagcaattttgatcaactccagcaaactcacagcgtgcccgtggctcgactccgtcgctacgagctcgcttcgaagcagtggagaagcttgtattcttcctctcctccttcggtcgcttggtcaatgccgaaaaaaacaccaactacaagcatccacgtcgcgtaaattctcatctatccaaagctgaatttccttcggactgtacgtgataaaattacgaatcttccgttgtacgctgtcgccttgaaacgtcgtacgcaccagaatccaccacagcacttctcgatcatctttatacagcgcctcaagcacgaggcgtccccggtcttcctccgctacccacccagcaatctcaatgtggcggttcctaaaaacgatctcgtgtgctgcttcgaggtccagcggtgatccgtgctcaaccatccaccgcagtgtcggtacgttccaacaattgtcgatcaacttgacagagctcaaatcatatccgtgctctaacaaacaatcagctgcttccagacatcggctttgaagtgcaaattcgagcaactctgggtccgtgactccaagcccattcttaagaaaccactgcagcacctcggcatgatggttccggatagcgacgcagatggactccgtcgaacgcagctcgagtccaaaccggcccacccagtccagaattgcaaggttgccttcctcgcatgcgatcctcgctagacaccgtaaacaatcccggacgaaatctggacgctgctcgtaaacagtctgaagcaccttcaattggtcactcgttgctcgattcgagcagcgattttctaggacatcgggaccaaagtggcacttcaccacgatatcttgtgccttgcgcagctcatagtctgaaaatccgtcggttctgtgctcgagtagaaacaggaagatgtcgaggtggcctgcagtggcggcaaagttcatcgaatcatttgtatatccctcgggataaactccgtgcaaccagcggacaatctccagataccctttggaggctgcccaatccatcacgaaaggcctgttaacaattcctcgcgaagatttggcgtgaagccatttgagaagtggcaagtccccatttcgagcagcagaacacggtgccgactcagaataccctgtttgaccttgcttatgcagccactcgataacatccatgtgaccatttgcggcagcggcgtctaaaagatcgtcacatccactgatcgagtcggggaagtgttcatgcagccactttaacaagtctaaatgcccgcgccgagccacagtcgtagtatccaagtacgggtgatcattacggtgacatttgagatgcacgttctcataaacccactcgaccagctctaggttgccgctattcaccgctccacgcaaaatttgtgcagaaccgcgttcgtgttgaacttgatgtagccatttcaccacttccaagtgtccactctcggcagctccttctatcgcggcctttgtacacttgaacagattgttcaggtgcaaccattccagtacttcgagatgcccattcttcgccgccttgataatggcatcagctgaacacacttcccttttgacgctatgaaaccactgagcgatggagagatggccgttttccacagctttgctcattgcactacagcccccgctgcacgtatcggttcgaatatcatagagccacttgaccacctcgaagtgcccgtgttccgctgccagattcaacgcctcacccgtgcagtgtccataccgccaactcttctcaatgtatcctttcgtgtctatcccagtcttcgctagcgtgtgccagtccatgccccgctcaaaaagccacttgaccgcatctagatgaccgtgtgttgctgcaacttgtagtatgccgacaaaagcgaacttccagggtccgcggccatcgtcgcgctcagtcatccatcgaagcacatgtgtatgcccacctcgagcggcagctttcacggcctcgtcccaatcaggtatggtcttccccaagagatactccagagtaagttccgaggcgctggcctcacaggcagcagagagaactttataactcaaccttccaaccaagtaatcgtcaacactttgcagtgcatgcggaacccaaaggcgattcttgcacacgattcgcacggccgcgcggacacgaaacgtctgctccatggcaacttgaaatgtgacactataaacctctgcagctcgtgaaactggacaagtatcagtccaaggcatccatccatcaatcaaactatcgatccatcagtcaatcaatcgaatccatgttgaagtgacaagcctctacgtttgcttattggtctctttttaagccaatcacatttccctttatcgcatttcccgccaaatttccagccagtcgcgaagcggcgtcgccccatgctaatggagctctcaacgcggccacccaagcgccttgccagcgagctggatgatgaccccacgcagacaaagagggcggaagtctatcgcaacgacgcatctactactccatccacgaatccattggctgcaacacccagcgcgatggaaatccgagccttcggcctcgaagaccgcgccgaggccgtcatctcacggggtaaagagagctgggcgctcgcgaacctgtccaagtggcgtcacgagtctctcgaccaggcctgtaacattacacaccgtcaaggagaagctaatagtaaactcagcagtaaggaatacttgcggcaacgccagcgcgcgtaccgtcagcagtgtctcgcagcgtccagtcgccacgcagagacacatgccactactacgacacatcatcgggacagctaacgctaaggcaatgcagcaatacagagtgactatttcatatcttgtcctttctgggcagtatttgtaagcagtggaattgtgagcgttgctagtcgtcgtcctcctccaggtcgctgtcgtagaagatgctctgtcgaatactattgatccgttcctggtccagctgttgcttggctgctacggggtcgttgcccgatgcgtaggccccaccgcagtcgtccaacgcattctcaggctcgggtccttcgtacgtcaagaccttgtgcagactcaagtagtaggccaagaaggccgtcgagaacttgtccgagcctccgagctcgtccaggccctgcaccatcttctccaccttctgcttgttcacgagggcgatgcacgggatcatccagacgccgagcttgtccacgaggtactcagccttctcggcgttgatgcgcgcgaacttggtctcgaggtggtgcggcgccaggcgcgccaggtggccgtccacgagctggcagaaggcgttggccggcgtgaagaagtgcaccacgaccttgtcgctcttcttcatggtctcgaagaactcgtgcgtgtcggcgatggtcgagtactcgccgtggccctgcgcgcgcagctcctgcgctttgcgcgccttgtgctgcatggcctgcagccgcttctcgcgcagacgctcgagctcgtcgtcgtcggcctcctccagcttcttgatggtctcgtccagcttctgctccttctggtccagcgtctccaacaccttctcgccgatcaggctggccaccatctcggcctgcgcggcggacgtcgacgccatggctactgtactgtaattgagctcttcgtatgtatgggcgccgcttggcgagccaaagacggatcggagcgacgtgattggcggaacagggatggattatcgacctatgaggggatagcatgtgatgaggcggggaagaaatggctacagtttggataacgatgttgacaacggtggacgctttgggattgaatcacagtggacgtttttgaattgaatcaaaatgagcgtcctctgcgtggacagtgcaggaaaaaagccctctataacgcgcgctcgttctcgtagtcgatgaggcgctggatcagatccttcttctggccctgcgtcgacagcttgcgctccttgagcttctccttgagcagcgccggcttcagcgccttgatcgcacgcgcgtccaggggctcgtctaaaatacgcaaccgcaacaccgaccaccgtcaataacaaagccacttactcaacgcaacagcatacaaaatagctttatgcacgacacttaccgtcgtccttgacctccaccttcttcttggccttctcgcgctcggcagcagctaaagtcaatcaaacaaacacgcaaaaacgtcagatagaactctaccaccagaattgcaacacgctagccatcactgcaggccagcaaataaaagcctcgaggcctctcccgcacacacacaacgtaccagcctcctcctccttcttgcgctgctcggcctcctcacgacgacgcttgacctcggccaggcgcgcgaggtccttcttggcctcgtccgtctcgcccgcgaggtgcttcttcaggtagtaggcggcggcgcgctccttctcgatggcctcgcgctctcgccggctgagctgctgcggcgcggcgttgccgtccatgtccttggccttcatgaccttgttggccttcttcttggcgttcgggttctgcgtcttggcgatggcggcgaagcccaccttcttcttctcctgctgcagcacggggccgtccgccttgttggagaagccgaagagcgagttggtctgcacgcgctcgaaggccactagctcctcgccctcctcgtccgagctgctctcgtcctccgagtcgtcgctgccctcctcgccgtcgtcgcggcgggccttgcgcgcgctctgcctctgctcctcctgctcgtcgcgcagcgtcatctcctcgagcgacgtcacgaacttgcgggccgtgcccttctcgcgcttcttgcggcccttgccgccggccgcgccgggcttgcctccagacttgccagtgtcgcgcatagtagatagatatggaaggaaggtggagccctagtgaagactttggttggccttggcttcctctcttatgcacccttcgcgacggcgacgtggtctgcactaccagaacgaggttttactcgacatccctgtagaagaacgggtacatgtaagagaacaaataagctcgataccgtggagggtgaacgaacttagcgctcgcgatttaacacctttgttaggttcgggtccgtcgccggaaggtatcattcgagaagacagacaccagggttcaccaaggaaactttactatggcggcgacggtgaggctgctcgcgcctgcagctccacctgcgcagtgtagtaagtgtgttcacctttgatgcgtgtattatcgccaacagatttgtattggaggcttctgcatccccgtgtacgcgctgctgccgttcgcgctcatgatgctgcagggctgctggaactggttccgcaagaacgtgctgggccaggacgacagcaagatcccggagaatgtgagccccatagtagcactcgccatgcttaaatttatactaacactcgtgcaatgctgctgcatgtaatagagccgcgtgatccacgtgacgtcggagcagcagttcaaggagctcattggcaagggcaagacgaccacgcgctccgtggtggtggacttcactgcgacgtggtgcggcccgtgccgctacatcagccccgtgtaccacgagctgagcgccaagtacccgtgcacgatcttcctcaaggtggacgtggacgagctcaagtcggtgtcgcgcggctgcggcgtgacggccatgccgacgttccagttcttccgcagcggcgtcaagtgcgatgagatgcgcggtgcagacaaaaacggcctggaggcgcggatccagaagcactacgtggaggtggagctgcctgaggacgagaagcccgtggtgcccgaggccgctgctggcaagacggaggatagcaacgcctctggtgaaggccttcgccagcgtaagccgcaggtgaccactgtggacacggaggagcagtgggagaagctcatccagcagaaccaggagtcaaacacggcggtgcgtgatctttcgcgaaacttgaaatggtgttgtagtatttttcagtagcgttcatactgacgttgtgcgcttcttgtgttgtatttgtttcttgggtttcgctcattcaaagctggtggtggatttctgggctacttggtgcaagccgtgcttggagatcgctccgttctttgaggagctgagcggccgattccccgctgccgtgttcgcgcgcgtggatgtcgacgaacttgaagtacgagatgcactggcaaggatgcaacttgtgtcggagctgatgtttgcgcactgtttttctgtatgcacagaccgtgacggaggagtacaacgtgtcgtcgttgccgagtttcaaggtgttcaagggcggcaaggtggttgacgagcttagcggggccatcaagactgctctggagagcatggttgccaagcatgcctcgagctgatggatagcgtagcgatcataacggacgtcgtaacatgattcagggctactaccggtaggcctggtttcattgcaccccaacacgcgagtcgatcttgaaagacggactacctctacggagctacaaacttattggaaggtgttcatatgcgatagctggcgtctcgttcgccacagcccgacgaagttttgatcgttccaaatgctaagcgtactgtgcattggtgggctacatggatgcggacgacaacttcaacctgaccgcgcaaatgtgctgactaagttatgctgaaaggattcgtatgcttatggtcgttgctccacagctgaatggtccgcagttgtttactgtgcagtaaaacaccggcacaactcaattgaaagcaagacatagtgcatccaaaggagcgaggtgtcatcggttcacagtcaagcgaagactgccacgctcagaggctgcaacagcccgcgatctttcttggagctgtcgactaggtggcttcaagctacatactgcttagcacaccacaacaattgttacccgcgcctgcttgcttaccagtcgttggtgcatgtgtcggtgttcgagcgccgacgatgcaagcgtagcggcctgccgcctcacgttccggtgcttgtaggataccctctccagctttgcaatgcgatcgcccctcagtacctcctaaacttatagcaaaggcatgcattgctatccggatacgttccatgctcggatcctcatgagcgccgctaaaggctccgttattttcgcgcagccgtcacgcgcgcgagtcgcgggcgtcgccgttggcccatcgttggtgtggtgcggcacacaaaatctgatttccctgcggaagagcgagcgagcacctccgcccacgatgtctcaaggctgctggggctggttcctgcgcaacgtgctgcgccaagacgacgagcggatccccgacaacgtgcgtgccatggcaagcagcaccgcggcgcgctgcgtgcagacgcctctcagccagtcatctccttgtctcctattctgactactgtagctttgtgttgcgcgctgcgtgcaatgtactgtagagtcgcgtgatccacgtgcgatccgagcagcagttcaaggagatcatcacgacggccaagcgctccattgtggtgaacttctcggccacgtggtccgccccgagccgctacatcagcgctgcattctacgagctgagcgccaagtacccggccacggccttcctcaaggtggatgcggacgagctcaacgccgtggcgcggagctatggcgtgacgaccatgccgacgttccagttcttccgcggcggcgacaagtgcgacgaggtgcgcggcgcagacagccaccgactggaggcgcggatccagaagcacgacgacggcgatctcaacggcaacggtcaggacgccgatggtctgcgccagcgcaagccgcgcgtggtgacggtcacctcgcaggagcagtgggagcagcttctgcagcagaaccaggagtcgagcaaagcggtacgtggtggatattgctccagtgtatatcggcgacggtcagtgtctgacgcgggtgtctgtcggacactggccggtacccgatacatgtacacgaagcacacttgatatcatctggggggcctcgcactacgttcaatgtggtactgctcgctgccttggcgctcgtactgacggtgtctcatgccatgttgtccctggtgcttgtcttggtgtctttcttggtgtcgctcgcctggcaccgatagttggtggtggacttctgggctacttggtgcaagccctgcgcggagatcgcgcccttcttcgaggagctgagcggccggttccccgcagctgtgtttgcgcgcgtggacgtcgacgagctcgaggtaagacgctcgctggcagcagcatgttgcaagttgctgttgtggccgcagcctgcagccgtgtctctttgacacatggctcattctcggaatgatggtgcggcggctaagtgaatgtgatgtgatgtgatacacgttgcgcgttggctacaccactgcagaacgtgaaggaggccgaggtgtcctcgctgcccaatttcaaggtgttcaagggcggcaaggccgtggacgagctggacggggccatccgcggcccgctggagggcatggtggcgcggcactacggctcggcggcggccgcgagctgctgatcccggccgtcacgcacagacgacgacgaggaggaccacatgaccgatgtctcatatatttcccatttcgggtcaggccgcgctgttccccttcacttttttcatgcaccgcccgggggcgcggacaggcaaagaacccggagccagccagccatttgcacctcccccgacttgaggaggttgagcttgatgttttcagcttagaattgaagtctgaagaaggctgctccgagcagccttctccagcagtgctccggcatcgcgcgatttgcgagtgcccctgcaagttgcgttgcagtgcaaccgagcagacattctggtgaaagaccggtttctacacgtggtttatgacacatcactgcgcgtctcgcagtggggtaatcaacgcttagggcacgcggcccatccccgcgcatcaaagtcggcgactttgaggtcgaaaactgggtcctcgacgcaaaaatggaaaccctctccttctcattttctcctcgacaacatcgagttcctgttcgcagtccacttcattgtacggagaaggtccacgtgctttacacgtatggagctgaggtcaataagaacgctgcccttatacctgaatccctggagcccagcctgagtgagtattatagagcatcatatgaagacgccctcttacgaacttcgcgacagccgagtatcatttcaggctaagatactcacactgcatacgcccacaacaaacgcaattgctgtttcgataagccgccgatctcgcgcactgccgcaccgctcgccgccgtggtgccgcagcggccttagtcgagattagtaaacttcgaaaatgggccccaagcgagcccatttaggccgccccgcgtgcctgtttcttgccgtcccacgagcagcaaattgcccgcacccgccttgatcgcgcccgtcaccaccacgtgcattcatgtccgcgctgcgatgcagtcgctggctgacaggctcggagcgagcgagcgagtccccattggcgaccatggcagagtctccattgcagccgctggctggagttcatcgctcgttgcggtgcggcggcgctggatactatcgagtcggatcgcagtcaactcgcttttcaatcaactcgcgcgatccatcgcgacaaagaatccgggcttgaagatcgagcagttcaagcgtgtcaccttggcgtcccgcgcttctcgtttgatgggtacaacacgccgcgctgctagcaaaaaagatatcgcagagatggcttcgctcgcgccgcggacgcgcagctgggcccccatcgcgagcaagccgccgccgggcgccatccactggccggggccggtcccggcgcgcccggagcccctgcttggtccgcatgggccgcgttacttctccatgcggtggcgtgcggtggcgcattgtgcgggcgccgagcgcggttttcggccaatcgcggcgcgcgctcggcgggtgattatggcttcagggcccccgcaatcggtggattcgatgacggctatgaagggacctgcgcaagccgatacgggcgccgccgggtcagattagcatgttcggcggggtatagtactgcgcagggcttcgaattctattctgggcccggcgcaggtcggcgcgcggtgtagccactcgctgcgcgccgcatgtatttatagaggccgttttaatgccccccaccaaaccgattggtgggttgcgactgtctgcggcgctgccttctctcgcccacgccgctctcacttctgtttttagcaccagctcgtaaatagcgcagcgcaggcggcaccgccaaggacaagaggaaggaagccgcagcttcgccctccgcacactccacagagactcagacattccacacagacagtcccgcgccatgcagctcctccgtcagctcgtgctcctcgcggccaccgcgctggtcgccgccgtcccaagctccgctgcggagcagccggcgcagcagcgcacgcgtctgcgcggcctgctggagcagctcgtgagcgacgaggccacgcccgcgcccgcgcgcgagctcctggccacctgggaggacggcaaggcgggcgagtcccgcaagctgcagcccatcgccgacaagatcgtgggcggcgaggccgtcgtggtgttcaacgaccgccgcgtgagccccgaggcccagatggagtcggccgtcgtgcaattcaacgtgcggacgcggcccaactgcgtcgtgagcgtgtgcggcgagctcaccaagtggtacctcggctccaaggagcagtgcttcgacctgcgcgtggcgcccaagtcggcggacgaccgcgagaacggcctgatccacggcgtctcggccgcgtactcgggcctgcgccccgtggcccacaagctgtacctcaagttcgaccagaccaacctcatcgacggcgacaagtgcgagtacgagatcatctccggcagcaagaccgtgcggcaggaggagctggccaccggctcgcagcaagccgcggcataggccacagggccggatcgctcccccctccctcatgtgcgcttcggctgcatacagccttctcgtagtgtaaagagctgtacaataggatagaacccactaatattaactcgcgcttgccagcattttgcaaccccgggcgtgctctctcgatcgacgctacgttcttcggcattggtgggtacaacagccgagtctaggcgtggcgtcggcggcggcggatatcacaacgcctcgtccggcatggctctggactgttgacagctcgcgcgatggccgcgaagacaaggttgctggcggaagcaaggtgccgatggtttcgctgggcagtattgttggcgccttgctcagcgcgctcccagcttggcgagccgagccgagcgggccggccagccattccgaactctcccgcccgctcccgcgcgcatatcttcgccggcacatcacgagagcaacttgaatttgcacgcctatccaagcggcacagcatgtcgccgagttcgactccagatttagggcagagtttcatgttgaaagagaacgccgatatgctgtctgttactttcaaagtaactttggtggtttccccagcaacgacaatgagcgtcgagcaatcggaatctgcactccagcggccgctatgtcgctgcacaattattcaatcaaccgaaacgctgcgctctaaagcggcttcagtagcagcgagcgagccttggccagcatagcattttaccgcagtgctgaactcacatgctcctcttccactgccgacgtgttcgatgggttagaatagctacgcgctgatagcgcgtggtggcggagggtgcagtcagttcaccgccaagacttgcaactcgtgtgttggcctaggtgtaaggcgagaggaaaggctgatgatatatactatattggtggtgaaacctgagcgttattggtggtgaaacctgcagcgtttcgacactggggtttccaaacccgcgacacgttgttaccagcgaccgcaagcagcaactccagcgtccgcagcgtgtctgcccaccaccagcgcgtcgtgttgatccgacgcgctcgacaagccctaattgctccagcggttgggccacccgttagcaaaccgctacagcgcttcctcggcagcggatgtcctcgcagccaacccttggtgtgacgacgagatcgctgcaccagcgtctagagcacggcgnnnnnnnnnnnnnnnnnnnnnnnnnnnnnnnnnnnnnnnnnnnnnnnnnnnnnnnnnnnnnnnnnnnnnnnnnnnnnnnnnnnnnnnnnnnnnnnnnnnnagcacggactagggcacgccgtgctcatttcgcgcgccagcagcaccaaccgcgcgtcaactcaagcgctccagctggacgcttcgtcatacgtgataaacgccactaatacccagcgcattatattatagttcccgtgtagaataccggcatacacttccagtgccaagcagctccattctgcgctaaccctgcctttcgctatgaaatggagcccgccagcaaaatgtctgcgacaaagtgcgcccttgcccgtggtgcctgtctccgccaagcgcttaaaacagtatctaactcattagtaataatcgaatgcatacttatcacatgtgtttcctctaaatacgaatccatctactaacatagtgtccaaatgatgtttaaatgtactgacatacgcacccaaacccgcatctttgcgcccagggctaggctacgttcgaacgccttcttcattcaagggcataaaggctgggcgactcaagacgacgcgtgcagcattttacatttgcgtcggcgccgctcaattcgctccacgccgctggaacctacagagcctattatcctacagtactatccagccagccttagatgaagaccgcccggctgcgctgcggccagcagtatgaccggcagatctcgctgacgctgcgcgcgctgcagttcgccacgtgcgcggtggcgctggcgctcgtggccgccagcttcgaggcgcgcaagatcacgctgcacgtcgagggcggcgcgccgcaggaggtgaccgtgtactacggcgggccggccgtcaacttcgtgctcgtcgtgtcgttcgccgccgtgctgtacggcggcttcttcctgctgctggtcttcgggctgcgctgcgccagcatgcccgcgccctggagcttcggcgtggacgccgtcttcaccatgctcttcatgagcgccggctgcgcgctggccgcgtgcgactacgtgcgctactgcgacgcgctgggcggcgtggtgcgctgcgcgctgctggcgtcggccgcagcgctgtgcttcatggccttcgtgagcttcctgctgagcgtggcgtggggcgcctggatgcgcaacacgtgggtcaagcccccggcgaaggacccgctgcgccaggtcacgcgcaaggagctcaacacggacccggtgctggccgagatggagctggacgtcgagcgcgccgccacgtacgactccagcacgtacatccaggacggcttcagacgggcatgagcgagcgagactcaagcgtgtaaatatgacgaggaagcgagcgagatagggtgaagaagaactttcttaggacgaagtaccataatgccaataacagacagacagcttcaactgcacgcggggcgttcgctcccatggccggacacgctattagatgggatgccgccacgcaggactccccaagacgcgtccgctcgatatcgaagcggtcggttcgccctgcatgatgcagagagaaggctggatggccaggatgtttgctgtcgtgcgtgcgtgctcacataccactcgggaatcgctggcgtacaggtgcaagatggcgtgacgctcggtctccgttgacacccgtgggacggcagtcatgccgcgtgatcgaccgctgcctcggctcacagcttgggtgtgttgtgccagcttgatggagaggtaaatggagcttcggcgctgtcaagtagcgatgtgagcgcggacgggcggtcgcggcggctccagctcatgccccttgaggcgctttgcaggggtcacttcggatcctgcgctcgaggaaacgctatttgaatatgacgaaggctccgggcaaatcgaggctacgcggcgctaagctgcgctcccgacagcgcatgaaggcgatgacggtgggctttggcgtggcgatggccttcacgctggcacttttatccattgtgagcacttcaccggatccgacagctaccaacggcgtcgaccacgtcacgcggcacctgcgcgagttcttaaccgaccagagcacccacggacctgccgacgctgcaatggaagctcaagcgcgacgcgaccagaagccaagcccgcctgatgctacggcgcgggaggcacaagctcgacgcgaccagaagccgaacccaccgctcgccgcagtgatggaggcgcaggctcggcgggaccaaaagccttccattatgacgatggagtccgagctccgcgttgccggcacggaatcaatcaccccagcgccggctaaggccgtgactgacagccacgctcgcactacaactaccaagagcgccatggaggcccttccaccccgacacgaggagcgacacgactgggagccttcacccgatgcaatcgcccatgcagaagcgaaggctgagaaggcagaagagatcgccctggcggcgctcgaggcagcaatgaaggccgagaagcgtgctgaagctgctgaagaagctgcggagatagccatcatcgctcaagttggctacatgatcgaagacgcacggagaggagagcagatcgcgatgtttggcgagacggaagacagcgacaacagtgaagacagtaagggcagcaaggacaatgtcgagactgtaatggggaggcgttcttggtaaactcattagcttacgagagctgacacgactagcagcaattcatcgacagtaatagtgcccacttcaacatgtaccatgacattcggtacgtttggtcatgaagagctgttgttattttgtaagaagctggaatgagaatcatactctggtttgctaaagctaccaagttggtaccaacatgcacgcgtgtgatacacttttgtactcacaaagtactggacagttcgatcccttagcttccagccctccgcctcttgatcgattgcgagaaacaccagtggcaagcctacacatcattcatattattcttgagccattgctgagtacctctcgggcatcgctggatagcgtcgtgaatctcgcgtcgggtgttttcctcttgaaattgcgtatgcattagaatccaccacacaacatttcgatcgttgttttgcagtgccttcagtacaaggtctccccggtccttttcagccacccaccaagctacctcgatgtatctatattccacaaccaacaacgttgctgttggcaagtcaagcgatggaccctgttcaacgagccaccgcattaccgggacattcttgtgtttcgcagcaatcttggccacctcaagcaaatgtactgcaaccccgtgctccgtcaaccaacgaacggcgtctagccggccattttcagctgctggctcaagcagacccggacccgtaacttcaaacccattctcataaaaccactgcagcagtttaacgtcgccacgaccaacagcgctaccaatcggagctgtcgaacgcagctcgactccaaattggtggacccagtctagaatggcaatgttgccttcagaacatgcaatccacgctaaacagcgcaaaaaaccttgaacgaaacgagaccgcggcctgaaaacagtctgcagcatcttcaattgttcatcactcgctggattcgagcgtcgaccaccaaagtgacactttacgtggatatctcgagctgaatctttcacattgcttggaaatccttccgtccggtgttcaattagatacaaaataatgtcgaggtgcccttcagcagcagcgaagtacaatgcgtccttcgtgcacttcggggcgattttcatgcaaccactggacaatctcaagatgaccattttcagctgctcgatccatcgcctcggggccaaatgtactcgggcaattcctatgattccatataagaaccccccaatgtccaaaccgcgcagcgtgagtcgatgcccgtctggagcacggtgctcatgtagccatgtgacaacgtccaagtgaccatttcctgcagcgcaatctgtatcggagtggtcaaacacgttgggtaagtgttcgtgcacccattttaacacgtgcaaatgacccccgcaaacgtaacattcatgaatggtacagagagctgatagttcatatgcacattctcataaaaccactcgatcagttccagatgaccattactggccgctggatacagcgctcgttgagaaatgcagccatgtcgaacttggtacagccattccactacccgtttccggcagctccgtccaccccaattgtcgtactcggaagaaggttgatcgaatgcagccatttcaacatgtcaaggtgtccattcttagcggccccgtcagcggcatgagctgagcacgtttcttcgttgaccttgtgcagccactgcgccatggcgaggtgtccgttcgcaacagcttggttcatcgagctgccgtacctttgatactcatggagccactgcaccacggctagatgtccgtgtctaaccgccagacctactgccatggacacatcgtgctcatacaacctggtctcggtcaaggaaattcgactcagcctttccaatctgccgatgtcggtgccccgcttaaataaccacttgacaacttcaaagtgcccgtgagatgcaacaaattctcaaaatccgccttccatgggcctcgaccatcctgccgattcgtcatccagcgcaggacatggatatatcctccttgtgctgtagcacgcaacgcctccttccaattgggtgtcgtgtgtgacagaaaatattccagagtgaattcgagcgtccctccctggcatgcagcattcaacgctttctgggggaacagaggacctaagtaagcatcaatagagtctaccaataccacttgaagaagacaacccgcttgagctggaaaccaatggtggcagacgaactgggcggcggcgtgcaggagcgatttcggcttcatcgctgcgccgattcggaactgatggtccgatagcattgccgatagggctgaagacattaatctttctgttgaatgcatccatcgaccccgaagacatagggcatttttgcctcttcatacccatttctgagttcacttcgttaatttaactcgaagctcgagctatcagaccagtatttttccaagttgtacttagtcctgctaaatatgacttcgtgggctcaataatactgactaaaaacctggctaacgtggcggacatgtggtgggtacttgactttatgagcagccaggaacaaccaagcaacttcgcgtttcgtattgctcgattgatgggtacttaacgaaatcaaaagatgccaatcggaaaatcctaaacatgcattatctaccgcctggatggcttcacggccaatgaactacttctagccggtctatgttggatgctacttcgaagtatttctcgaagctctgggtctaaaatttgaaatccgatgtcgtaaaagtgcacgaacaggcgctgataacacagctgaagtccaaactggttggcctcaaccaagactgcgtggtgtcctttactagcagcggctcagcttcaattgatcataagtggcttgattcgagcgtccgtttcatctgtaaaaccgggatcatattgacacgaaataatacttcgtgcatatcgtttgcgaaccagcattttcgcgtacacttagctgagtgaaacgcggtaagtaataggtcaatatttgcataagtaaagatgaccagtcatcacttgacaactttcataaccacgcagaagtgctggccgttgaagtggtagcgtcaaaactttggttgaagcttcaaggctaacacttcagctaagctaagctaaacaaacaattcatttcagaatctacgcgagccttcacgccgactctcggttcgtgtgccaacactggctacaagcgaaaggggactgccttctgcagctagaagaatctgctgggtccaagtcggcaaaaacaaaaagcatcaactgcgtcttccctttgaactggatgatctcagtgcgtaaatgtaaacactagtacaatacaatgagagcggcgaagctatagggtagaatcgaagagaataattcaacagtgtctacgaattggaaccaaattctgaaaacccaatgtccaacaaaagtaccgcaattctttcaagctcgtcaagtacttatcaatcaaacaggtctcgggtccaatctgacgaaagacgcttggcgacgaaagttggtgcctcgacgcacaaactatttttccagaagctatgccagcctcatcgcagtggatatggccgtcgccagctaaggtagtccgcggcagctgtctgcgtggctcattgccccatatcgaacgccttatcgacgactatgcggtcgagctagaccagaacgttctcctcgcagcatgcgaacgtggtgccccactgcccattctcgagtacaatatcaagcggacgacacccaagtggagggatgtggcggaagttgccaccaaaggtggacacttgcacgcttcaggtggatgatggaccgccaagacggccgagggccgtgggggtcggaccttaattggtgtgttgaaggtaagggaggttagaaaaggaagaccactgagaagagtcgacagcgccggagactcgagtcctttgaggaaggtatatttgagaatgagaacacacttggagcaggggctccgtacggacatggataggggcattccccttggagacgtgaggctagatctctaacctatctacacttgttgcctggacagaatgagcactcgcaatgacatatatcacctcattggtaacatattgtagttgtgtggcccatcacacggccaacagccgggtgtccgagctgctggacgtgcggccggtggcaggggcaagtcagcgggctggagccaccgaccaacgctggaagtgggcgattgaagttgaagcagcgtgactgccgaagatcgcaggagggacgacgtgtgaaggcgagtcaaggtggaagcatgccaggaggcgaggcgacgccagcggagcgaacgtgaggacaagaagtgtcgagtcgacaagaagggggagaggtccaagtaggataggaagggcgctgtagctagagttagtataggcgacggaggggctacggtagataggtgggaggcgagcggcggccgtgtcgactcgaccctcagttaagatttgttgcgggacgtgcagcgagttgagactaatacattgatttgcgccggaagcacgggttgctgaccttcgtactgcggcggagggcgtcggcgaggagtcgagcagtaagggagaggtaagctgaggtagagctcgcacatgatgagggcagtggacaagtagagcgacgggaccgtcgagagagactacgggggttgtggcggagcgcctcgaccgagggacaaagggtccacgtgtacctacgggtgaaggacacctgcgtccgttgcatgtaaccgggctagttgcggggagcaggcggcggggctacccgaccgtcggtgccgataacccttcctcccagtcatctctatccgtcacgaggtggcggccagtagctgtctggttgaccactgtaagaactgcctcgtgctgatgccaccgcggctaacccgctacctaggtgccgaggtctgcaatcgatgacggctggctgacgacctgtaatggatggggcagggaggttggcgctagctacaatatcaccgctgagtaatgcttgcaaggttttcctacttgctacactccccctcaagcataacgtcgaaggtgaagcatggtactcgggtacttgggaactgcactgtggcagagtggtggcaagatcgcaatctgccactcgagctcgtactcactacacatcgtgataagcctggttgatgaagtcaacggctcgcagctcatttgctgctccttgaaatgcatcgcttgtagaccgtagctgtttcgattctgcctttggcgctgcgatatcagaaacttgtccacgcggtcttggtggtgctagctcggcatcgggctgcccatcggttgattcggtgttagccgagggtttttcactggtggctggggctctgctcttgaggctccgccgttggtatcccttgtcgggatctgatgatgccttatcttcggatggttgcctggagtccaggacctgggcgctacgggtgcaacacgtcttagttatcgcctcccgcagaatttcgtattccgcaggttatcaattggttctggggtcgtcactgatgggctggtattcgctccgccgggacttgttgttcttgcttccttgtcggtatcgatgtcggatagcaagcctggacgttacgggtgcaacacgctatcgttgtcacacgccgtagattctcgtacgtcgcaggtagtgaaggtgtcacgagtactcgtcggcactaagctcgtagtccgcactgccggagtcgtatgacgaaacttctccagtagttgacgtaggttgggctcataacctaaaggaggttagaaaaggaagaccactgagaagagtcgacagcgccggagactcgagtcctttgaggaaggtatatttgagaaggtatatttgatacttgcaacagaaggcgctgctgcacatggtcacacggagctgctcaagtggctgcacactcgaggtttatcttcccctgttgctctgcatcgagctgctgcaaatggccatcttgaaatcgtgcaatggctgcacgaacacaccaacgctgattcatcacgtgcaatgtcggatgctgccagtaatgtgcatttcgaagtggtgcaatggctgtttcacaacctcaacaatacgagtaccgacaagtcatccgcgatggagagtgcatcgtgaaaagggcatctccgcatcatccggtggcttcaccagcgcgtgagctgtttggagtgtgtactccaagggttatgaatgaagcagtaggtggaggtcatgccgacgtggttttatggctgtttgatcgatgccacaagggatgctccggatccgctgcatgggatgcgcaatgaatggagatttggaaatgcttcagtggttggacacgcatttcaacgatcaacttacttcgatggaaacatgtgcagcggcctcggggggccgcccagaagtaataaagtggttgcatgaacaccaaacggatgggaacccggggacagcattggatcccgcaaatagccacctccaagtcctgcagtggttgcataaccaccgccgagaagaaggatgtacaccacgcgcaatgaatcgggctgtgaaaaatgggcacctggacgttgtgaaatggctacatgaaaatctatctgcaagttgcagcgattcggccatgcgtaaggcagccgctaatgggcatttggaagtggtcaagtgtctaaatgagaacggaattggcgactgcaatgggagtttgctggctgctgcgtgggcagcgaggccttttaccttgcgcaacatacaagtcaacgtggttctcattggggactcggatctgccagtagacaagggcgtctgcaagtgcttcttgtgctggtacaaaacttctatcgaactggcaggagaatcaatttgggcgctcgtattgcggtatgcgagtgtttccagaatactttgcacgaatcatcggaccagtgtgcatcctcagctactttagcgtggctcgaagtgttaaaatgtttggagcaattccacgccggtgggttcctgacgttcgtatgcataatgctcgctcaagctttggaaggagggtacgcgatgatggcttgacaattcttcagtcgtcacaatgagcaggaaaagcgcgagtatcttgcggctgcagatcaggagcctcatattattctggtgaggggtgaggtggttggtcgagaatggaactccgttagacgtatctaccgctatcaaactcggcacaaaacgcagttacgactgctacgttgaggcggcctggtggctgtcagaaatggatcgtgtgacgctcgtggtgaacggactggaacaaaagaaatacttcaaattgctgttgtgggtgcttgaaaataccgatttcaaggaagatggctctcgtgtcacgattcgcaacactatcagtaaagccccgacggtcgcagctcagttgctttttgaaaatctcacgaagcctgacgttggtaaatggtgtttctaggtaattgcttggtggctggtcgaaaacattctaaaggcttaagacactacacaaggataaagtggtgtggtagattcgaatgtataagaattttggcgacaatatcacacaaagtagtatccgcgacgccatttagaggcttgtaaatcgggcggtcctggcggtacctttgaaacgcgactctgtatcttgagccaagattcttgtttcgtggtggatcactttggatcttgcgctggaggaaccagtagctgaagatgccgagatgcagcgcgggaaggcggtggcgatggtgttggggctggcgttggctttcgcgctggggattttatcgatcgcgctgagttcgacagctagtgaaggcgtcggccaagtgacacgacacttgcgcgcgtactgggtagacgagagccaacatggacgtgccggcatcgacatggaggcactggcgcggcgcgaccaaaaaccgagtccgcccggggttatggcgatggagtcccagcttggcgctgctacgagtttcatagaaaccctttcacccaacgagaaaccggacgagagtgacgacagcaaggaaagtgtggaccacaaggaggaaaccccccagcgtccatggggaagaacctcgtgtgtgaaaacccaggaacatcagcgcttgcgactcgtgattgacgggtattcggtatcggcgctgtgatagctcagttgctttttcttcttcttctcaatctttgcagtggatagtgggtgtccgatgcctgaaacgcggtcatggtaagctacagtgttggctacagctcgttggcctaaaatgagtacaagataccaacttaaaaatctcgacaaatggcagtgctggtccacccccacttttttttttaaattcatatagacctagctgaatcttcaatatgacactacatgtagaaagtttgaacactcacttaatgataacctcgtgctggtaagccagcgattagcacttcttcaacattgcttacgttgtttcgtgaatttgcattctgtattgcaactttactgtagatagattgatgaagcagcttggaatagactacagtatcctaggcgctgtcagccgcaggtgttgtggtgggttgtccataatatgttcaggctacggacagggatctttttcgagttggtaggccaaagccgtcaacgagaagtcgttggttggttgttggagcataggtatactgtactgtagatctgaatttggtcaagattgcctcaactaccggtagtgcggtggctaattcaacatttcttttggctgcaaacgagtgatataatacataaccacttactttatgtataatacccgggtaggcatttttggttaatacattttctgaagttctctggtgcttcaagcatcaacaggacccaaactggattacggacacgtctcgatgccccataagatggagccacttcaccacagccaggtgaaccttgaacaccatgggtcaagcgtacgctaccaatgtcaccggttcgctgactataaagccactgcacgacagccaagtgctcgttctcagctgccattattatagctgctctgcattcaccacggcgagtgcacacgcgagcagttgactttcccagccagtacctagtgttccagtcggtgtgttgcttcacaacctctaaatgcccatgagcagcagcgacttccaaggcgcgttcaaaatctgacctccatggaccccggtcatcttgacaagtggtgatccagcgcaagccatgatccacatagatgtcatgcgcgacagaagatactcgagcgtttgctcggatacgcctctcttgaatgcgacattattaaatgcttcctggcatggacgtggtaacagaagcatctcgattgagtgtacatgtactatgtgagggaagttgaagccactaagccagtgttggtttagaaactgattgcagtgtacattgacttcatcgctgccaaatctaaaatgaaggagccttgggcttaaacataacacttcaccgaaccatggtttagacattatccattaatccaagtgaaatgtatgctgcgtttcaactaattggcttggtcagaacattgacaaaattgaatttcagttgcgcacacaatgtgggtcgtgtattggaattctgccctgccagcaggaggttggcttccacatgtaatacataacattgacgacaacttgagtgggagtttgagccacgaggttctcagtgtggcttgcgaggatggggcctccgaacacactttgtagtgcctcttcaaaaactcggcacccgtttggaaggaggcagtgcaagtcgccgctcgagccgaacacatacatgggagaatgggcgtggagacggacgaggacctaatagagagtccaagcgtcatctagcagaaaacaaaatataaattgccgaaacggtatgtagcacgttatttgtgtccgtgaatggcatcacaacaagcaacgtcttcagagtttagataatggtttcaagttgacgctgcgcacgagtttaaatgaagtttacgaagtcggaagtccgtacacattactcattactcgaaagtccgcgaaatgtactcaaaagtaagggacccctcatttgatctgctagtgatagagcagaaaacttacacacgcgtttgcaaacagcactaactgtaagtaagtgtgttgtgaaaatcactaacatgtttgcagttgtaacttacaaccaatggctgcattaaatggcgatgatacggtcgatcttgttgctagacagacccctacgacaaaaaatatagtacaatatactttactttagtgaatttcggatttgtcccgactgggatgaatagaccgatgtcactccgcgagttcttaaccttttggagcgttcaatagcttaaacgaagcataagacacgccgctttcgattgatgcagttaaatcgcgattcgtacttaggttcgtaagcatcttttcgtttgaaaccgtctcaaaacgaaagacctgagccaaacattcacagcttaggatcagcgttgcgtaaataaaaattgcaataaaactagtgataaaattggggtcaacaactacaattagaaaattggctgcaatgattttattgtaggataaggaagctttctcccaacttggcattccttgcgcttctctgtcattgcatctatccaatcaggacaagttcttcaatgaatttagccaatcacgatcgattcgtgtgtatcccaacattttcccaattattttgggaatttacagtcttgctagaataatgtccaatacaaaagtttagtgtaattgttgcattactcatatttgaccgcaaattcccaatacaaatcatgattgtatcgttggtggctgtgactcgtctgctttctctcctctcccatttgaaaagatgcagcgggcgccgagagggcttgacatcccgcaagggacagcagggcaggaggcagcggcgatgaagtgcttcagcgaattcttatctcttgctaacatgaatgacgagtcaattgctagtattgcgaagtcgctgtctattcctgatgctctaccaagtcaaaacttttactctttgctaaccgccttcttcattttcttgcaaactaagccaagtgctcgaggaggccgtcttgctatggctactgctgtgagctatatgtcccaagttgtgaacctgctccgagagcggtaccctctgtacttgtcagacagccagcgaattgcgaaaatacgcgacaaaatgggttcaactattgaggagcgaaatttgctaactggcgtgcagactggtgaagctccaggctgcacgctcagcgacttgcgtgttctggtgcaggaaactgcgattaagggggttggctcaggttataagagtttacatgacgctgctgtattaacgttaatgtggcacacgtttggtcgagcgatcgatacctgttttgctaggaagagccagctatctatggcggcatcgggagagctctttctgcatctagctcgaatcaagacttcggtggttcaaggcatctcaatttacaaggccgcgactcactgggagcagtgtatgctgcacggcctcggaatgctgttcgttggagcgtcggagcctccagctatgtgttcccgctagtgccgcacgcggcggcatcggatttgccaggggagaagacctacagccaagacgaagctatactctactgggagaaccttgaagagaaagctgaaccaaggaacgagccaccaacaaagcgcgtgagaggaaggcccaacgtgtccaagtatattaacgacgtcatcaccatggtctgcgagcgccaagcccaggcctctgccccgctgcccccgacgctcaccgcaaggctgagcagcgactccttgcgccgcggctccgcagcgtatacaaacgcctcaccgcagcttgcgatccagtggatctcgacccggggagcttggctgctagactcactcacgaaggcgttcgcgtacgtgggtaccacgacacgcgaggaccagagtgtcggcaaagtcctcgctggataccgagacccgcacctgccatgcgtcacgcccacgattgccaccttgagcgagcttcttcctgcgctcgagtacgcccagctgctaaccctgcgcggccagctcttcaagaacgtcagcggcttcacggacaccacgctcaacgttgacgccttagtcctggatgaggcgctcgcgtccctgctcatccatcttgacgacgtcgcgacggcagtccagcaggagcaggctgccacaggcttcacatcgcattacctgtactgctttcacgaagctctggacgcagccaacgtagcgctgggagctcggctctcgctggacacgtgcattggttggggtcggcagcttcgcacggcttggcaaacggagaacttcggacagctgggtgaacgcagcaatggaaacaccaccatacttgccgcaaccgtcacccagatgctatcgtccatcgcagcaatgcagcgcacacttcagaagctcgtcgcggcccacgagagcaaggccaccagcgctgacggtcctgctccttgtcgctgtgctggccaggccccgcaggcgagcactgacaccgtcgttgaagcgcactctcttgctggctgcttctacaactggtacacactggagctgtggcacacggcaacccaaaagaaacaacagtttgttcgctctgacctcaaggcaggcgtcaacatcatgatcatagcagcagggcgagaggtagacgtaacaacggcgccactggaccgggacggcgtcgcggaagcagcgtgtctggacgctagcggaagacttggacaagaaggtcaacgctgcgcttgggagtatcgacggtaaaggccgatccaaaaccgcggggtcgctacggaagcgctggagaaagctgcgcgctgaccaccgctctgcgtacgacgcgctctgctcagcatttatcacccgcaaagcgaacggtggcatcgtcgaccgctgcacaccagctagtcaccaatggaagcaaaaagacttggagtcgtaggatcacgcagcttgtattaacgcttaatacattcctattcatacaacatggataatcgaattcaaggcgcaaatgcacacgtcatcgccatcccacaacttaagcacagcgcatggattcccgtcagtcccgatacaaagtcacacacaatagaaaaacgctcacacaccgtcagcgagcgcgcacgacctcgtgcttggccgacagctaccaaaaccggcagcataacacccgccctgccgggttttgtagctgctttcgacgggtccttgcgtggggcgcgtggggcgcgcctgggggcactcgggtctggggtggtcggcgggggaggcgtgcggcacgctcggagcgcgctgtcgtgttggagatgcggggcggaaagtgtgaaggcggagaaggctgcgcagtcggccaaaaataaaaccttaaggttttttcttggctttggagccgataaaccagtccatactgtgttgaagtcatttggaatctcacttatgattggctctcctcattgggagcggcgtttgggacctggtcgattaatgtattgtacaagacagttgacttgataactgtatgtgcgtgggtagccaatcaaatggtccatacagacccctatacaaaccacaagaatacaattcaatgcctacattgtacaattaaaactggtttgcgggctttggcccgcggtgttcgcagttcggtcttttttttactgtatgccaaaacctgcacagtagaaaactttatttactactagtagtactatgtagtaatagcgctatgcttgccgcaggagagagttgcgtgaagacgttcttgaattttagcgcttgctcttatttttgtactgtgaaatatcatgcgtccatttgctttgaatttgaatttgttgcggtttagatggctatctactcccaggatcgcgctcagctgcaatcccgcctatagatggcgtgcccgtgcagacacgcacctacggtagaagcccctacacaacgacctaatcggtcgagtcctatagaatatgcataaataaacagtgctagcgtcaacacactaccgcgtagtgtcaggatccactcttggcaacctttgttgtccaagttcatgccatcgttgaccccgttctcgtagctggttttgtcgatgaaggagtcgacgtgacaagataccttgagtacgtcgagcccagttaccccgtcgcgttttaattcctgtgttgatgtcattaaagagcgtgcgtcgctctcgctgtgctggttcctcttcgatccgcgaacaggtatagttccaatactcttgaagtgttgtccatgtgccgaggaatacccgagcatgcaaactgctgccttgtgcacttgtgtacgacactacattagcccatttttcgctgcgttttgtcatagttgggtaacggcgccaccctttaggagcgtcatagaccccgagtcccagggtctatgacgtatcatctagctgatggcgaacccgtgcccaccacgcgggcactctggtttcacccgtattcaggtcgtgccaatcaaacacggggtgtataagcgttgacttctctgcttcgatattcgtccactccggtagtagccactcaaccttgaagctttgttccagaacctggccccaaagtggaatagtccgccttgcatgcttgggtgcgtgttctcctctcgccagcaccccgatgagaattgttcgtgggttccgtgtgaaaaccgcacttaatggttgatgatgatgttgctgtaggatggagtgtcctgttcgcatacgcagttctcctgacggtacttttaccacccaaacgcagcctatggattccagcagcatgtggccttcacttccgcggtacgtcgctacccagtaaaccggcgaatcgattaacagttgattctcatacaaattcttgaacctgttccaccagtcagccgtgttgggattgtatacgtcgtcgatccaccaactcgaaatatcaccagacggagctagatacaccagaccaggaaacgcatcgtaccgaatgccctgtcggaatgtggcagctgcccatcccggggtccactgggctagatgtgcctggaacaggccaacatgcgagtggcatcgctgtacaacatctagcagcgaaaccggtagtagacagccagcgacatcacttcggtgcagctcatgctgtaccacctcgacgaatcgcccgtctcgacaaagttgcttagggcttcccagccagtccatccattgcgcgtgagcccataagccttccgcgagtttgaccatgggcctccactggaccgccccatcagttcctcttggcgcccataattctcgctgccccgtaccagcggcctcagcagtagcgtggccgatcgccggaagaaagatatgttgatccggaagccagctctctttgtcgacatcataatatagggagttgagaagggcttgcatttgagtgacctcgatacacatcggtagcccgagtccaaaacgatgatcctgagtatcagtggttatatgcgggtcctcaccatcaccgacttcagcgcagcgtacgcaatgagcggaccacctgtcgtcaaaacggtgcttcaccgcgttcgtgtggagaacattcccccgtgtccgccagtagaatcttcgcaatgaagccgtccaattgtcactgtatatcatgctcacttcatctggagcgagggtttgcctagtttcgtgtttcatttgctgcttgctaacccagcgtcggcgataatcctcagcggcacgggtctgtaggtacagcagagtgttgccgaaaacaagtttaccattctcatcaagtatcatgtaggagtcgtagtcaatccagtctgagtacgatgctagcatttgttgcatgtgactcgctttggctgccgcatcaacacttgcaagcgcctgccgtcgatggcggacttgtacgtctgtcgtaagctgattttccttatgtgatgcttcccaggagactgtcattgagccacttgaacacatagctcggcaaagtgaacgaacttcaatgcgatggacatctcgatatttaagctggcggattttccccagtgcaagagctcttgctttttgaaaaacagcgatcgcacttttgttatcacaaatctgctccccgctgtcaccatacaggacgatccctgccaataaggcgtgaatctcgcaacgggtagatgtgatatcattgtggtggatgctcaactgaccagtcacggtatgaccgcctggagcctggagagcacaaccaccttgtgatgctggcgtgtttgccgctaccacacttccgtcgccgacttgaacggtaatcgatctgtccccctcgttccaggcatattgtacactggcggcacgaaaactagacaccgcgtcttcggcgattcgacggctatgacattccccccgtagacactgcgggtggtgccagcgcctgcaattcaaacaccacttctctccgcgataccgtccacactcggtacatgctgtagcctcctccaaagggcgacctcgcagcaacgttgcgtcgtatcgtagctgactacgcgctgctgcctcgagtaagatgtcacggtcgttgacaccacgaacacctgcaacttcagtcgtagtccatagtactatcctgtcacttccccgtgcgctacgtggcaagtacgtcggcgtcactggaacacaaacagcttcgtattcatcaaccagtctgcgatgagtgcgctgataccagatatcacttcctcttggacgttcataccaccaccgaattggcattagcgttccgagcatattctttttcaagtcaccaatgtccctgtaacctagctcgtggtgcaaaatccgcgcttccccccctgacatctgaatgttcactgctactacccagtcccccacaccgattctcatttggtacggactgataccggcaggggctggttcacaacccactggctctagcaggttatagctctcgccctccactaactgcgatttccagtttccgtagagctggttgactttaagctgcttcgcacgactccaatgacctttctcctccagctggcgtcttgtaagcaggcgcgttccgagctcggcacagatgtctccgacgtagcgtagtttgtagtttgaattccagttaacggctatgaggattttgctgagagacggtggggtaatagtgagcagaggtcgatcattggcacgtgcagacattgtggctggtggtggagtccatcgaactgcacagcgaagtggcggcttgagtttggatgcgaaccgtataatttgtgcctcccacgttcgaatatgagccggcggggagataggaacgctcaattgattttccgtgaggcctgcattgctctgataggcctccagtctctataccagtacgtggtacacaggcaggctcggagtattcaagattcgcagggcttcctgtagccgatgcacattcgcctcacgttcacagttcgcaagcccgatcccattcagtttgtcatagtagacgtatcggggggttgaaaacggaagccgaagtacgcttcgagcaacatgccgaataaacgtatcaaccatacctgctacagatattgctcctccgagtaccatccgataccgcagtcgtggaatccacacactgttaacaatatagcgaaactgttccagcgatatctgcaagcgctgtagtcgcgctgcttcgtccgtcaatcgtacccataccggcgaaatagtggcttcccacaggtttcctccaccttggtaaatacctaggtgtttaaagccttcgtccggcgcaactactgggactggtcggggtacgctgtagccatcattgagctccaccgcatcgtagtgcgtattcatgggggctaagtacatcataaaggacttggctgcaccgaacacgcctcccgtacccatcttacccgtgaaaacattcgtcactgcactgcgtgcctgaatacctcgatgcgaggttgttacgtctagctgatcgtcaacgaacaatgtgctgctaatatcgatgccgctcccctcatggtgatgggtgatgtgaaccggatcggggcacttctcgagttgattctgtagacaatccatgtagcaggctatatggaggatcgacaagatagacccttgcccaataccaaattctcgcgcaccagtggaaatccaaccaaatgccgtacgaacatctatttctccggcgcctagaagatcaatcataagctccctcggtgtatttggtacaccaattcctctgtaaatcagatccatgcaccacttggggatgcgatcaaagcacttgaggcaatccttggataccataattaactgctctcggagtgccttggagcgctcagtcagaagtgtgactagcaacgcagcatcgataacggtccggtcagtctgaaaaccgtgctgcattcgactgattaggattccgggctccacatatcgtttaagaaccaagaaaagccggcgggcgagcgcggattgaactgtaataggtcgccgcggcggtaggccttttgcattatccaatgttgggtctacatgtgctgctttgggtagaaataccatctgcttccgtcggagaatcgctggtgctcttccagacttgaggattaaatcaataatcttgcgctctcttgctcgaattgtttccggagccgctatccacatttcttgagagattccgccatatccgggtgcgacgtgctttttcaattggcgatcgatgtctgtctgcatctcaggtgtatacacatattcctcccaggaattccctgcttcacgccaataatttgcgaatcgacctccgcgctcgatatcgggaaggatccactcacgcgcaaactctggtaaagtactagcgtcctcagctgaaagtgtagtaagataaggtggtggatcagttttttaccgggaggtatccaattgtccagtagtttaatcaattccgcctgcacctcctcgcgttgttcattgtacctagcacctccatcatcttggataacagcgcttcgtatcgtcactggtggcgcgttcttaccaagagtactgctgagaaatcgcttgaggcctccctctgcaaaccaatattgacgctgacgccgaatacgttctcgcctctgggtatcccgccaattcctacgtgatctcataatggctttccagcgtttgtgaatggtgtgtacccatgccatccactcctcagtagtagtggtttgcggcttgtgcgatattaacgcaattagttctcttgctcctttctcatgagcacatccacgtactagtcggtctggatgctaaacccacttcggccacaatattccgttccatggctggtctaactcgtgaacctgtacgccaggcaactggacaagtcgatcgagctgacgtagctgtgcagtacagcgattgctgcgtttgatgcacacgcctcgtgcgagtttcctacgagactggttggtcactccccatagatctttagcgctcttgtaaaggcattgatgtaggttctcgattgcgttttcgagccaagtttgaatctcttctatagaacttctttctgggtcgatgtcctcaatcagttgaagctttccttcacacagcaaccgactggtattcatggtgaaatcctaaggtgtcttggttcttgtgttaacgacattgatcggggtgatgttttgaatcggagctgcaatttgggcaccgcgctcacatcgcagaataacaaaaggagtccccacatgatcactcgaagtaatactgtggagccagattccactacgtgcgacagcagattcatgctcggctgagatgtaaatgtcgtcgagggctgttttgatgttgcgacgggcgtaggtatatcttggtgtaactggatgccgcagcttgaaagtggatactaagcctaaactggccgtccatgctgcaaatttacaactcatttccttagcttccctggttcatgcgtccatttgctggatggcttacgctgctcaatctgccgtggcggatctacgtgaactcacactattggactgctactgcgggagtccccgtatgcggcgctgcagcaggggcgtagtcagccgtcataaccgcaaattttgatttcattgcatgaactcacactagcgttactgttattcatggtacatactgcacagcttcaagatggcgccaagactaactcagacaccagagggaggcataatctcgcagaccacaacagtgtaattgtaacccaaacgtgattcctgcggcaataccagcttttccgcggggtcctctctcgacatcttcgtttattttgcgccacaatgtctactttgtaagtgaagcgagtgcgagcgctaagagtgcatgcgtctaataatacctgctcagacctgatgcatccgttgcaaatgatagacttttattaggtgtttctgataattttgtcagccagtgccagcatttgtcgaaggtaatcataatttgactagattattgcaatagtgccagcatttggcaaaagtccgattctggcgcaggagatgcccctggatcgtgtggattgcacatatatattgtgcctttctgtcatttgtccgcctaacccttctagccccagaccttattctgtatcctacagaataagcattagacttgattaaagtatacttcaaaacctgtcaaagatttgctgttggaggccctttcgcatatgcggtcaagcgctgggtacattgtgcacagaacagctacgaaagtgaacaaaacatgctcaatgtatccaccatatgccgaaatggcgagcttctattggtcgtggcgagcgtagagcacgctcaaaacctgctacatggtaataccttgcaaggctgctaaggcagcatacttcggctccagccacccatcttcggcacgtcgcgataaacgcagaggaagaaatcgccctgttcctaactgacgtagtgaggaggaactgggcgaattcttccttgtgcttgacattaacgcatcattagatttctttaacccacctaacaagcttgttacgattgtctctctaacaacaccagggagcttgcatgctcaatagcccgtaatgacacgcactacacacggttcctcttgtacgaaacaggacaatatatgatattcatgccaacgtctacttcttcctttacatgtgcacgctcttcaatgttcgcgccagccgtgggtcatcttcgccattttggcagcctccgctttgctctgtagcctccggcactgccgctccattcctgccgctttcatcggtagcctctgtcccttcttctgtaatctccggtgtaacctcatcacgcggagagcatcttctgtagcatctgtcgtagcatctaccgcttcttatgtagtctccggtgtagccacaccatgaggggcgcttcttctgtagcctcttgagtagccactgcatcagctacaatatagcggtagacccggctgtagccggcttcgtaggaaccgatgaggttgtgcgctgactccgcaatcgatctgccaatcgggccacacgcgagagctcatagcgtcgtctgggtcggatcaccaggtctggtaatcaacatcgcaacgtagattcaatataccactagtacaatattacagagcaaagtacacgctctcgcttacctgtagatcacaatggcgctcatcatgatcgtcttcggccatggtccttggccacttgggcgcgctcgacgggccccaacaaagcttgcattacgaagtcttgaacagcgcagtttcggaattaaggaaagtacgagtggctgacacgcggcggttttaggcttccacccgaattttcaatcctgttggtggtttatactcgtccgtcttttaccgcggaataaaccccgtttatcttcccatcgctaatctaacaggaagatgtgcacaataccggctatacaaacatccatatgcaaagttcgaaagagaggacaagtttgctggatattatgtcctgtgacaatgcttattctgtaggatacataatacggggttagaggggctaatcgggcttcttaatcgggctgtctcctcttatttagaggacgatattaataattcggaggagggccaagctaaaagactggatatagaaaagtccagtgatttgaaaatcatttgtgtgtcgtgggatggtgagcgagcctcgctcagcgaggtgagctcgcttagagcatctccaacggtagtgcaaaacccaaggaattgcaccaaatatttgcaaaattgcaaaaaaaatcatccccaaaggggaagtgataggggttcagaagtagtgctgaagtaacacgttgaaatcgatagtgcaattcccggatggcgtagtgattatcggcctgctattcactacggcctgccagctattgcacgcaaagtgcccaagaatgcactaccacgacgtacaatcgattataaagcaaaaccaataatacacttttttatgcaaagtactggaccagcctccatatttcttgagaagtcgagaacacttggtcaagcgaaaaaattgacctgaaacatgttaccggttcatcactggttttgactggagcgcccaaattaatcagtgtttcgagctgaggagctgtgtttataattattccctcacaatgtactccgcccgggtagagatgctcagcggaggctctagtggtcattggtagtgataatgacgaccagaacattgagttaaagtactagcagtagcgagtaacttcaatttccactacaaacactgcaatatacgcatgatttattacggctagctagatcatttttcgcgcgcccgttttgctaaagcattgtcatcgctcgtcgtggcaactctcttcctaggaaaacaccatcggcagacatcgtcttcgatatgttccaacacccacgccttcatgctcgcgtgcgcttcgtcaacagcgccggagattgcactctgcgagagtttttcttcaaacctggtgcgcatcagcagccaccacaccaaactatgactctcgttgcggatcgcctccagtaccagttgcacacgaactgactcagaatcccaccacatgacctccatgtagtcaggattcatagttacttttgtcgcagtagacagatcaatagtggctccattatcgaggagccaccgcagtaagctcatattgccgttttccgacgcctgtaggaccaattgtggcccgcttaactcgtatccgtgctcccgaagccagcgagttgcccattttggactgctagctgtaataagtcctgctcaaacagcgtgccatagttctggtgcagccattttaccacattgaggtcgcctctacttacagctcggcgaataggagctgttgtcaggagctttatctcgaattggtttagccattccaaaatgggtatgtgaccttgttcaactgcgacttcagccaaacaccggagacaaccccgaacaaacgcaggtgaacgtagtacagctccctcagttcgctaccctcgaatgggtccttcgtcaagcttgtagtagaaaattgatgtcgaaataaatccagaacctcaaaatttcgacgtatttcaattgccgaggagggaaatccctcagtgcggtgcgtgagcagccagagcaccacattaaggtgtcctctataagcggccatttccatcgcttggcccgtgcacccttcggatcgattttcatggagccattgaacgacatcgagatgacctttttccgccgctgcattcatcacatccgaccgaaatcggtcaggataatgctcatgcagccattgcaccatttccaagtggccgatgcgtgcggcacgccagggagcgaggcatgtacacgcttcgcttcggttgtcgtgtagccacttgataacattaaggtggccatttgtagcggccacgttcatctcatgcccagagaaaatgtgtgggtattcctggtgcagccactttaggatctccaaatatccgtatctggctgcgattgctgatgaatcccccatttctcgatgaacgtcgctcggaacgttggcatacagccactgggctacttcgaagtggccattctgaatcggaagatacaatttagctgatctgcaccccccaacaaccgtattttgcagccacttgagcacaggaagatgtcccttctcagctgcgttatcgaccgcacgagacgtacaatagcagatacgcttcttgtgtaatcattgcaagatttccaagtgtccctcctctgcggcaatgttcgcagcattcgttgaacaaatatcgccattctcaaacagccattgtgccaccgcgagatgccccccagcaacagcatagtccattatcgactccataggtccaccagcaaatacctcccgtctcacgctgtggagccactgtacgacagctaagtgaccgtttccagctgcgagttgtaaaccttcacacagatcatgtcgacacgaccaagccttggcatagtaccctcgcgttgacttgcttagcttccgcgtagtgtttaggtcgagacctcgctcgaataaccacttgaccagctttaaatgcccatgagatgcagcaactcccagtaaattatcaaaatccgacctccatggaccgcgccggtccggacgatcccccatccagcgcagaacatgaaggtgtccaccttgagcagtagcatacagggcctccttccaaatgggtgtagcgcaagacagtaaatactctagtgtggactccagtgttcctgctcgacacgcgccggtaaaagctttctgtggggaaagtggacccaaaaacgcgtcgatgaaatctacaagtacaaattgcacaaggcagcctcctttcgctgggtaccaatgctgacacacgaactgagcagcagcgtggatgcatcgactcgacttcattactgcgccaattctcaactgataggatgcaggcatcaatcgcaggcactgggaaagagctgtagccatcaatctacatgttaccctacaactcgaatgattaagcacattaaccaccaaaaacaaatttaacttatgaactgatacgccgatgctacttggatagagcggtcttctcaccccttcgcggctttaaacacagcatgtacgcaccttgaggctcgttagcttttgaaagagcatctgtgccgccaccctgggcacattcctgataggtgacacgagagttttcttccttgaaatcggtatagcacaatatggcgctcttcaccagcaatggcaacaaaccggcgcttttcgtcctctttacaccgccagaagaactgcggagctgctatcgccagaatcctccttgcaaggcttggtccagcataatgcatacaagcgagtcgaatccatcagcgtgaaattgctccagagctttagatacttcgcgccgcgctatagaagctgggactacgcaccgatcaattagtttgccgaaagccttcttgacacatctgagaatcatatcgtaatcggtagaatgtgattgcctgtcaccttggagttcgcgctgtgccaacacaagatgcacttgcaaatgcccttggctcgcagcaggacctagcccccaatcagagccacgctgctccttgtgtttatcaaggggttgcctttattttggttcttatgcaaacatgctgattgcagcgttgcgtcaatttacattgaaaaattgattgagatttgccgtcacgctacaatccgcagtttgtaagaactgtcgtttgcgcccctgcgggtgtttgagataatgcaacataaggttttatgttgcattatcggttaaagagcacaacaaagccgtgctctgccggaacagctctggattttacgttgctcttgggcatataaggaggaattactccagcttggtagcttttgtaaaaagctatgcaagtacttagtagtagatttgtagtcatgagttatactgatttaaactaccactatgctacgcactccgcgcggtcatcagaccttaaacgctcgctacacttacttggacagatgccaggttcaggagtagagcttcagtttggacagcccagccggccaaggaagaattttactaataggaggcacctagaaccccgcttttctagtttgtatgcagatggttttcgtgatgcagtggtgctatctaattgcgcggaccatgtatgttgcgctgatacgaagagatcgcttcactcatcattttctctacgttttcatacaactttccttaggattacacggataatgaatttgttaggaatacacggtcacttcttacgattgaagcacaggagatcgcgctagaatctacgccatgatcgatgcggcctttatgctgacaagctgcaggggctgtcccactccgagtggcgcggctaacctttaggctgcttgcgtcttggcccccacgtttttcggataatcctgtaggttggtacagtttgtctagagaactaatgtcttaattggtaggtttgtagccgagcgattttggtttgcttcaacggacttgcataccgttttcaggcgcacatccagcccaattctctagttggctatttttggcgcccccaatttttttcggctgcctgatgtacatgtactgtcgccgcatcaatttcacgaggaaaattagatatagagcgaaagtatggcattcctggctagttcatgatagctttttgggaagtgggcgtatttcaatttgtgttcctggatatgcatgcattcgcagctcctttagcccccccccccgatctcttcagccatgaacgagtgttgataccctacgggttctcgccaaaaaaggatgtggcgccagccgctacggcagctcgatacgaaaactcgattacggcttccattaaccacaacaactctgggggtcaatgaactcgctcatcaaagcagacgttgcgacgtaattgtaggaatgagctcttattattgcgtgtacagcacacggtgggatcgacatcgtcgttgttatagtgtaaagcgatgccgaaatcatcaccactggaacacttcaaggcgggatcccgtcagcatgttgaccgagcgaaaaaaatcggatggacgttgcttgagcggtagataaattagatgtcgcaggtatatataattgattagggagtatcaaatgtaataggtaatttgtcttaatcttaaccggatgggtcaacttagcagcataaattgattagggagcaggttatttaatataactggaatctcgactgcatatgtgagcagcactaaatatcatattggtcaggtatttgatgcaagaataatggcacctcagtggcatccacccatggactctggataaaatccagagaacagcaatgacagttgtacagcaattgtattgacagttgtacagcaattgtattacagcacagcagcgcaaactccgattcattattacagctcaaagcatgctttcggcgacaagctaaccaggcagcagcaataataaaagaggggtgatctgtcagtcaatgcaatttgtgaggaatcgaccgaatcggggcagcaagcgagcaataggtaggtcgccgtcgtatcggctaagttagtttaggcatgtggctgtcatttctaagatacgatatctgtatgtacatgtcggacgccacagcagcagcaactataaaccgtcgttgagtaaaacaaaattatcgctattgattaatggtcgtgggtgcagactgtttgttgagagtcgactttgaagtgaggagacctaaacggcattgaaatcagtatagcaattctataaaatcaagttgcaggcgtcaaatttggacatatacaccgaataaccccaaaaaataaacacattatatattcaatatgaaccgaagctcagtctggcaggcattagtttaatgactgctcgagttcccttaataaaacttggttcacttcaaaatttcgctctggtaaattttcttgatgaagtacaatattttatcaggaagcgatgattatccatccaaaatcgatgatatatggtcaggttttgataataatgtgccagaaacgatcatattctatccaaaaacgattagtaaataccgcaataccgtcaagttaataattttatcaacaataatgttttaaatattaccttaaagcgatagtacatggctacaagttcgtgatgcaatggacaccaggatagaggataacaagaccaagagggacagaggacgatagacgagcagtagagaagccgtagagaaagcagccgaaagctaataacgagaactagtaagtccggctcacgtgcgtgtataagaagaacttaatcttctcagtagatcatccttaacccagttagcggttggcttcaaaccaggcagcacggcgcgcagtttgcagatgacttagtggcatacgttcgcgccactcgctgagcgagatcctatcctttttgcggatgaagtacgctttgctggctaggcggcgatcgattttacgtgcctcagcacgagccgcgaccgaccgtttatcgcagcggttctcgtgagccaaataaatggttgcgtagctcttgcagtagcggcaagttcgtttcgtttcgcattgaggtacattgttgtctgttcacctctttggctaatgacatcctacgaccttgtcgacgatcgtctcattgtagcaggcgccttagtggcgatcccggcacccctaaagtgtgacggccacgagctccgaagaactctcatcagtggtgcgttccaaccagtgcccgatgtcactggccgcgtgctgggacgcatgttgccatttgtcggcggacagtagcggcaagttcgaggggcgttcgtcttgggccgaccgaccttcctgcttgaacgggagcaggcgggccagcgacgcgctttccgtttcgtagcaacttgtccatgagctagatagtgcagcgtgttgaacgtgaatgaaccggaaatgtcgccccataacgacagcgcagcgacgctgtcataaactgtcagttttttccaaggtgtttctgataattttgtcagcgagtgccagcatttgtcgaaggtaatcataatttgactagattattgcaatagtgccagcatttggcaaaagtccgccagatatcgcttaagtacgtatcgtacttaattgtacggcacgtcgaacacggcaaaaccagtcacctagtttaggcggctttgcagcttcttaaactaggattttcacgactttccgtcacgttttgggcttgaaatgacggaaagtcatgaaaaaacctagactaggcgtcgaggaggccgcctcgaacctagcgggccacctcgaaagtggccccccgccaaacacgccgcgccgtgcctgccactccctgcctgtaacatgccggtgctgacgacgaacgctagcggagccgcgccgcccgtggtgggcgtgctgggcggcggccagctgggccgcatgatggccgacgcggcgcatcgcctcggcctgcaggtgctggtgctggacccgctgggtgccgagtcgcccgctggccagatgggcctcaaggccgtggccggcagcttcaccaaggaggaggacatcgccaagctggccgagcagtgcgacgtgctgacggtggagatcgagcacgtgaacgcggccttcctgcagcagttgcaggacaacaaggaggccggcctgcagggcgtgcacccggccccggccaccatcgcgctcatccaggacaagtaccagcagaagcagttcttcacgcaggtggccggcgtggacgtggccccgttcgagatcgtcacgtcgctgcaggccgcccgccaggtgggcgagagcttcggctacccgtacatgctcaagtcgcgccgcttcgcgtacgacggccggggcaacgccgtggtcaagagcgagaaggacctggtggaggccttcgagaagcttggggccaagctgctggtccaggagggcgcggccgtggacgagaagcagctggccgaggaggaggccaagctatacgccgagaagtgggtgcccttcgtcaaggagctggccgtgatggtggtcaagggcgccgacggtgacgtccgggcctaccccgtggtggagaccacccagcgcgacagcatttgtgacaccgtgctggcccccgcccagatcccggaggatgtggccaagcgcgccggtgagatggctcaggctgcggtggcgcagctcgagggccgcggcatctacggcgtggagctgttcctgactgcgaccggtgaagtgctgctcaacgagatcgccccgcgcccgcacaactcgggccactacacgatcgaggcctgcgagaccagccagttcgagcagcacctccgtgctattgccggcctgccgctcggcagctgtgcgctgcgtgtgcccgcagcgctgatggtgaatgtgctcggcgacgcctcgtcgtctgaggacgtcagcttctcgctgctgcgcaacagtttgagcatccccggcgccgctgctcacttctacggcaaggctggtgtgcgtccgggtcgtaagcttggccacgtgaccatcacggcgcccaaccttgaggagctgaccaagcgcgccaccgctctgtcgccggaggctgccaagaactcgggcctgctgaagctggagcgacagccgcttgtcggcattgttatgggctcggactcggacctcccgacgatggccgctgccgccgacatgcttgagaagttcggtgtgccctacgagttgactattgtgtcggcccaccgcacgccggcgcgtatgtacgagtacgctcagagtgctgccaagcgtggactcaaggtgatcatcgctggcgccggtggcgctgcccaccttcctggcatgatcgctgctctgacgcccctccctgttgtgggcgtccccgtcaagacctcgacgctcaatggtgaggactcgctgctcagcatcgtgcagatgccgcggggtgtgcctgtcgccactgttgctattggcaactccaccaacgccggtctgttggccgttcgcatcctcggcgccggagactcgtcgctcatcgaggctatggcgactttcctggacacccagaagcgcgaggtggacgacaagatcgagaagatggccaccagcggctggaaggagtacctccagaacatgaagaagcactagataaatagctacagctctagaccctaagcgtgaacaagaggggtttgctgtattttcagtgagtgtgtttggcaatctaagccagttgcattttctatctacttgttcttcttgagcttgaggctcttgagttggttcttgagcgtcttgggggtctgcttgttctgtcgcacagcggcggtttgctcgacctcggcgctgccgtgagccgccacattgcgccagtagaggagacccgccagactcacagcgaacaaggtgaagctgaggaaccagatgaagaagcccagcgccgactcgtaaaactccgccgtcagaatcgggaactggcccatgccgcgcaggaacggcgtcacgttctccttggtcaggtcgtcgcccagtctaaagccgccgaggttgggcggggccgtcgggtcaggcagcacgttcaaagagaccgcgttcaatccttcggaagtcagggtggcaggaatcgagacgttcggcgccacgcgctgcagcacccatgagacgcccttgaagatacccagaggcgtggccgtttgcttcatcaacagctgagcagcagcgagtaatgcgcacaccggcgcaaggtactgcagcgcgatgatcggcacgtagttgaactggaggcggaccttgctctgcagcagcgcgccgtccacgaagcccgggcgacccacaagagacgccatcacctcacgaggctctagcaggaagtgctgcaggtgcgtacggaagcacacaagacgaaccaggcaagccacaaacactacgtagatacgaagcgtgtggaactgagactccgtgaggctgtaccatttccagacatccgacgaggattcgctagtgagacccagtacctcgctctgcaggcagtcacgcgtcagcgcgcgcggagaacacttaaccagctcggcaggcaccagcacgttgctcgaaaggcgcggcacccacagcgcgcaaatcaggaccgggaagaacatgttcaggtgcagcagcaccttcatcacaaccgacgtctgcttgtccttgatcagctccgagtacatgcgcgcaaagcggaacgacggcaggaacgtcgtgcacgtgaagataccagcaaacaccgcgaacgtgacgaacagcgtgaccctggccatttcggccagcggcgcaacgttcacgaagtccgcgtccgtgaagcccacggcccgaagcaccatggccacacgttcgccggcgagttgcgccgccagctccaggtcaaagtccagcattcccttgggcgaaaggatgaagaaaccggaaacgatgacgccgatgaagcccacggacagacccagccgggcctcgtagcccgaccagccctgggcgaagttgagctgcagcgggaaccagagcgccacgagcatggccgacatgaggccgtacgtggccacgtccaccttgtcgtcggccgcgttgtcgccggccgggccgaaccacggcgccgtgtaggccacgaggctgccgaagcagcagcccagcgaggctgaggacacgagcaccacgagcatctcgtagagctcgaagaagagcgtctggctgaagacgccgggctccgtcttggctacacgcacgtagaacttgtccatcttctcggccgcgctaagcggctgaccggcctgcgccttggccgccttggagcccttggccgcggccggctggccgttgagcgtcgcgatgagctcgtcctcgggcggcaggaagaaggtcaggccattcaccagccacgacgccaggctgaagtgcgagcgcaggcgcagctgcacaaaggccagcagcatgccggccaggaactcgggcgggaacagcgccattgtcgacaccttacgcgcagcaagagagctaatggcaagggtggacgcgtcaggcgttgcgcggttgtagccacgactgtgtgcagcacttcaaaatgaagtaccgttatcctctcaaactgttatacctctttgtatgcataatgcgagggtccacggtactagctccgcaaaagtctcagccaaaagccacaattaattgctggagcagaatggtcatggaggtgcgcgtgcgtggcctggagggcccgaaggaggacgagccgcaggagctgccagacgagtcgcagatcgtggtggtgacgcccggccaggtgatcagcaccgacacgggcgcgttcctgcgcggccacggcacgtacctgagcggccgcaacgagctggtggccagcgtggccggcgtcgtggagaaggtgaaccagctcatcacggtgcggccgctcgtgtcccgctacatcggcgaggtgggtgacatcgtggtgggccgcgtgaccgacgtggccaacaagcgctggaaggtggacgtgaacggccagcaggacgccagcctcatgctcagctccgtgacgctgcccggcggggcccagcgccggcgcacgtacgccgaccagctgcagatgcgggccttcttcgtggagaacgacctcatctcgaccgagatccaggaggtccgctacgacggctcgctgagcctgcacacgcgcagtctgcgctacggcaagctcgagaacggccagttcgtggccgtggcggccccgctggtcaagcgcatgaagcagcacatggtcacgctcccgggtctcgggatcgacgtgatcctgggcaccaacgggtacatatgggtgtcgcgcagcatggccgcgctcggaggcgacgacgcagaggacacgagcagcagcatggagacccgcgtggaggtgctcacggccaagaggcagctgcacgcgtccacgcccatgagcgtggaggaccgccgcaagatcgcgcgcgtctcgcaggcgctgctgaaactcaacgagcagttccgattgatcacgcccgagagcatcatggccacgtacgagctgttggagtcccagggacggtagatagacgcaggacagaggtcgcttcaataaagctttacatatttttgtttttagtaacattggtgcggtgtccatgtggctttagcttaattgatgctgtagtgcttagccacaggtgactatgtcccctgaatggtcggtccatttccagtggtccattcgtctacagacacaatgttgcactgcaatatgcaccacaagtttttgttttgggtggtggtcgagggtcgtgtggtaacgtggaccattagcttgcgagcacacgtgaagctttcacttcaacataaaaccacttggcgccatgtgacttgcaattttacggcaggaagcgcagcttgcctctaacttaccgagcgacatgctgctgtcgcagaaggcacaacattaattcgcgcaacacaggactccggactcacgtaccatgggcgttgcctcagctcatttccaaaccttcgaccacgaaataagtctctttcctcaatgtcgtcgagttccgcggcgttcgtaccggtagcgctatcggcgtaccaagtcgagaagctcgaggccatgatgaatcagcaagtgcaggacgctatactggcccgctcggcacaagctgaaaaagataacgagttggactcggactggcgcttcgtcggctcattgggccagctcaagaccttcacgcttcgaggagccgacccatgcagttcaacttcgcctttggctacgacactccggtgcggtgctgcgcacaattcgcgcgacgagggacagctactttggcatcaagtggctcgccgagaacttcatctcggggaagcgtgatacctgcttcgtggagatggtgggctacactgtcgacggcaacggcaaagaggtcggctttgtggcgtcggtgtcggtggatgtacccgagtgtccggacctttcggggtgtatgaacatttctcgtgagcgaatgaagcgcacaatgctcatcagtccttcacaagaagagcccgaggcgacgtcggaaattttcatcatgggagccaccgatgccaacgagttggctctggtggcaaacgctcagcatcgactcaggatggccgcgctctgcgatatctcgctcgtgatcgactcacaaaacatcacaaagcggacgctcgcgctcgagaagaactgggtccccgatgaaagtcgctcttgttgcaccgtttgcagccgcaagttccacaagctgcatcgtcgccgacagcactgtcgaatgtgcggcgacgtcatctgcaagacctgctacgttactcggtctgtgcctgcagcgaacaccgacgacgatgctcgcaaatgcaaatttaagggttcgggtgctactcgcccgacgaaagtttgcgtgcgatgcgtcatggacctccgtggtgtcgacaagcggctcaacaacttctcgccaaacgtctcgaaaatgctcttagttggtacggactcgacggacgcgaagcgagagcccgctgtggggggttgtgcgttgaaatcggcagattccttcttcaccttctacgaactgggcgcgagcaagaacagtgctgcggacctccaccagctccagatcgttccttcactggcactcaccggcatcgatggtgaactggagaaaaaggcgagctcgtccagttttcgagctactgacagtatcggcggaattggggcaatggtttcggtcggatcgtgggcctccaagcgcacaggcccatcgttctccaccaacccggcccactcaagttcatccggtagacttcgtggtctctcccaactcagccgccgcagctctacgtcgagtggggccgacaagctcgaagagaaggtgaatcttcagagcaacaagatccaccgtgttgtcgccatttaatccagcctttggttgtaacctctatctgcgaacgaagcagccaatgatatctacccagacctcaaagatcttccgcggcttcatgttcgttatgagattcttattgaaataaagcatagctaactgtcgctacttcgggccatttcttctcttaatgctactgctaagttgtaccttcgcgaatgttttgtcgaaagctaatgcgctcgagctcgtttcgcaggagaaagcgagtccttcaatgtaacttcaccgccgaatatcgcccgctctcttccctgaaaaacgccacccatagccttctgagtcatgagttgctgcctccagccacttgcgcatatgatgtgtcgcttagcatcgcggattattactctgcgaggcctcttcctcagagcgtgtatgcaccaaacaaagggtttgttgctgttcttagttttatccaccaccaactgcactcgatcgttttcgcgaagcccctgcaagcgcaactccgcaaaaacgaacagagagtatctgttataaattgaaacgtagtcctgcagtgctttgaaacggtttcatgacaactttaactttcagaaatatgtctgcgcaccacactccgagtaataccagctacaaagtagtaccaatccgactctcgaatgttaaaccgctcctccaaacgaaccgctcagataatcatgatgctgttcagaaacttccggtgctttctgtgatacttcgcgtagtcatcgataacttgaagttttgggtcgtttttaggtagtttcctgacgtcttgaattttgaacaccgtttgtgcgagctgttctggttcgattcgagcgtcatgccacataccaaactgagaattcgtcagtttttgaaccaagctgttcgcatccggagcgtccttcaggcttaggagaagtagtgacaagtcgggtcctccaattttttcatacagaagagcatgtgcgcttgtctcgccaaaccccgactttttcatgtctaaatacgcttttgtgaacttgagccactgtaacatcttcgggttgtcgataaagcggacccctggcatgtcaagacccagcaacttgaacgcggactttgggtccacgtcagccatcagccataacttgttcgccgtattgccagccgtcaacgtcgaagcaaattcgccgagcttggtcaggactgaagggttcatccctctgttttcaatcgaaacgttagcatcgtcgtccacgttcgtagcttgagatcgtagtgatcttgtcgaggttgccatgtcttcagtagccatcatcgatcgcagggataaggtattgcgcccggccgtggcgccttgttcggccgatacgagtgccaaacaggcaccatcggagatggtcgatggccaggaggaacgcacgctgaagaagaaacataattcaggtcgtgtctgttgctcggaggtggcgcaagtgagagcctcgcctccactgccactgaaacaagtgcggatgaggattgcgctccattgcatcattcacgtttgcactgtatgttcgtcaaaccttctgctacgtcatctaggtttgcgttatgtagctacatatgacgagcataacgaaagctttgattacttttggtgcatctccaacggtacatgtagtgcatacagtattaatacaatgtatgcactgggatgcgccgcgccgaagcatggtcgaacgaaatcgatttaaataccgacactttcggaaagatgtgaacagcaaaaagatctgaacacttactaaagaagaagcataattcaggtcgtgtctgttgctcggaggtggcgcaagtgagagcctcgcctccactgccactgaaacaagtgcggatgaggattgcgctccattgcatcattcacgtttgcactgtatgttcgtcaaaccttctgctacgtcatctaggtttgcgttatgtagctacatatgacgagcataacgaaagatttgattacatttagtgcatctccaacggtacatgtagtgcatacagtattaatacaatgtatgcactgggatgcgccgcgccgaagcatggtcgaacgaaatcgatttaaataccgacactttcggaaagatgtgaacagcaaaaagatctgaacacttactaaagaagaagcataattcaggtcgtgtctgttgctcggaggtggcgcaagtgagagcctcgcctccactgccactgaaacaagtgcggatgaggattgcgctctattgcatcattcacgtttgcactgtatgttcgtcaaaccttctgctacgtcatctaggtttgcgttatgtagctacatatgacgagcataacgaaagatttgattacatttagtgcatctccaacggtacatgtagtgcatacagtattaatacaatgtatgcactgggatgcgccgcgccgaagcatggtcgaacgaaatcgatttaaataccgacactttcggaaagatgtgaacagcaaaaagatctgaacacttactaaagaagaagcataattcaggtcgtgtcttttgctcggaggtggcgcaagtgagagcctcgcctccactgccactgaaacaagtgcggatgaggattgcgctccattgcatcattcacgtttgcactgtatgttcgtcaaaccttctgctacgtcatctaggtttgcgttatgtagctacatatgacgagcataacgaaagatttgattacatttagtgcatctccaacggtacatgtagtgcatacagtattaatacaatgtatgcactgggatgcgccgcgccgaagcatggtcgaacgaaatcgatttaaataccgacactttcggaaagatgtgaacagcaaaaagatctgaacacttactaaatatcgagatttcctcaggataatctctacagaatttgacttgaaaaaagtcggcatatatttggccaatcatattaaatgctgataccttcacccacgatcacttcaacctcgcctgctagcacaccttggacactgccaacgtcgttgtcttgagcatccacaacgttgagaagtcgagcttcgtccagcattccttgcacgtctacgcttctggtgcagccgaagaacgggccggccttgtcgaaagagtgccgcactgtgtgttggaacagcaggaacgagcgacgaacgaaggcagtcgcattgaccgcgactaaggcgcacatggtttacctcggtgcatggcccggacaaccagttgcaattgaagctcgacgacgtctcgcggcatcaagtcaggcatcgtctcgagccatcactcaaggttcaagccgtcatcggcacggcagccaatcgtggggcgccacggccgcgcatcaagcgctgtggctacatgtgagagcagcagcagctcgaggagaagatagcaggctgtagttcgtttgatttttagctttggccccacctcaatcgcttttcaactttctccggacttcctaagtctccatcctaccctttcttccgtcgccgtcctcgcgtccgtcgccgcggtgaacttcctctgcatccaagaccttccaatactgtgtcctgcgtaatcatgcccagagcttgcatggcgcagaatggcttgttcaggaagtcttgagcaatctccagccggaagctggaggggtgggtatacgttgcggtggcattttgaaaatgagggcgatgcaaacactatgcactgaaatgattggctggtaggcaaatagttttaacaaatgaaatttagcgttatagttggaaagagttgaacacttcctaaaattggtatgtgagcaccgatctttgcaccgttcacttgacttgcttacagacggattaaatgatcagagctcaaatacactgtaccatatcaccatcagagttgaccgagattgaaggaaatcaggcttggataaagcagttgtggcatctctcgggaagccccctattgttgtgtttgagtcatatacattcgtattttgatgatctgttgttcttgatgagtctagcgcagccataccttcggctacgcgataatgtatctcattaaatgagatacattatcgaaatgaaatgttcatttcgtctgtttcacgccatcactgattcttgtcgatcagaatcaaacaccgaggaggttgccttcgaaaaaaaaaaaacaataatacaatccagagcatgcacatccaaggaaatgatcccttgtcgttctgttgcactggaacaaaagtggcggcgtgcatgctcaagaggaaccaccacaacggagagcacttgtgtccgccgccacccaataacgacatttctcctttcgctctccagccagcaagtcctcaagtcgccaagtatcacgaaccatgcgtctatcttttgtgctttctcttgtcgtggccattggctacgtcgtgacctgcaacgcaactgagtactccgacgaaaccaatatcgccatggtggaatctccagatctcgtccgtcgctcgctcaggaacggcgacattgccggtggaagatttcttcgagctcatgaagaggacgatgcgggggagcggaccttcagcgtgactgacctgtggaacaaggtggcggccaaaaagttggccaaggcgatgctggcggacccttcaaaggagcagaaagcgtacgagaagtgggcaaagaaggggtacagcctggataagatcaagaactggttggcaatcgcggaccccaagcagaaggggaagtacgaccgtatctacaacggatacacctttcacctgtatcagagctgagaaggtctcgccgaaatcgcatgcgattcgcgctctgctgttctccattcgaagcgtagaagtagagccgtaaaccgaagatttacaaactaatggttgcgtggtaatacaatgcaaccttagctcccaatacgtcactcccagcctgtgcatgctgactgcccagacccgagtttagcgaatttatttaatttttaattctcaacttggtggtattggcacccaaagtttgacagtcggtttcttatacagacgactacagtactaatatgacacttcacagcgcaagcttaaagttatcttcgtcagtgtcccaacccgcttaaaaacctgtcgttgctcttgttggcccctgtcgcacaaaagagctcgtttgagtcgaatcctccacggaaaagacgacctaaaacctcgtggcaattgtcgacgcacttccactggaatccctagacttcagtacaccctcagcgccgtgctatgggctcgtggatcccgtacgactggatacagtcttgctgtatccagtcgtacggctggctttggcaactctccaatgggaaaaggtcttacccaaatctggaaagatattagaacaaacttgtcgattttccagtgctcttcttagaaaagttctgctgacaccggaaagctgtagactctaagtgtgtttttcggtgtctctatgtgtgtgctggcatgatttcgtataaccgaggccggggtagagacggtagagggaaggtgaaaccagatcccccaaaactgcaatttcggtgcctgtgaagcgagagcgtggcctggagcagtgcgctttaggcccaggcctaggctaggctattcctccctctttccattgagaccaaccccagattcatcgatttcgtgggggattcaaggcattcatttccctggagcactttgaggttttcacgatttgagggccgtgagatctatccccggccggctgtgcaagaccgggaagggccccagtgtttttttcgttgggtgtttttttcggtgtcagtagcaagagccgctcttctaaacgcaaaacgactggcgattgactttttatgtgatcgtatactgatcgggtcggtggatttggtcgggcttcgcctgggtgagctccccgtttgcaccgccaatttcgcttcgctcatagcgggcaaggcgttggtaaaaagatgatgactcctacttagacatacctactccggcccacgcgccgaccattgcagacctccacttcgctgcggttgcaaacggtctttctgaggcctctctcgaaagtgttaacactacaatcgtgtataggcaagaccgatcaaatcccccgacccgatcagtatacgaccccattttaatattaaaaaaatctacggcttgtgcatattggtatattattgcggctgctgctactatcgcatgtagcccatgctactgccttggcaacgagtgctaaccttcgtttggcatctgcggggctggtctttagtagtcgttagcggatagctaagtgacaacaatgctcaattcaataacaaaaacgagtgctaacctacccgatgatgggatgtcggttattctgggcttcgctacaagttgtatgctgaagtttggctgttcgatcttgtactgaagctttatgcttaaatttgtatgttccatattgtactgaggtttgtatgctcgtggttgaagttggaaagatgtgcgacctttgatatccaagatcggcacaacacacggtcgtagcttttgtgaccgacgccaaaccaaacaagcagcacagcatcacactgacagacagtttctcctgctaacatcggctaggtactcgcgggtatacatacatgtacacgcgacctcaacaaagcattgataacccacaccaccaactgacacaaacaacgagttcatcagaggaaacatcgatcgcattgataagattgaagcatgactttcactatgaactgacacagcaacaaagctaacacgtatttcgagaccggacgaaccagagcggtgatggatgactcgggcgggctaaacacacacttgcttactccaccgaacgaagctgacggtacgccttctgagacgacgttccagccgtggctctagccgacgcacttgcagacgcactcgccgtaacgctcgccgatgcgccgcccgtcatcgcggcaccgttgctgctcgtcacagatgccgtgttggacgtgccgtctccgttcaagacggtgacggtcttgctcgagtcgccgctggggttgttgccgtcgttcgcgttcgcattggcattggcgtttccacgtccaggcgcggcgttactgtaggtggtaccagtgccggcaggcgcactgttgacagccgtcgcgggagcattgtagacgctggccgacggagcgccgttcacagggtagcctgcaggattggttgcgttaggctgggaggactactttaaattccaaaaagtctgctcggttgtatctaacgttagctcgattttaccaactcgagtacaactatatcttccatactggaacactttgaagaaactaatagatatcttctttggctacgaagtagccaagtgttgtgctaatacttcgcctactgagtggtcgagtgttttggtgccactacaaagctaagccaaatccaaaacaacaaccattaatacatgcgctagcagtaccaaacagtggttacgtactatgttcaaagtagcaaatgaggggcgaagcccctcatttgcagcgcctaccatcatttttcttagggaaatttcaggaaggtgactcaatattaaaatttgtgcaaaaggtgatagaaggatttgtgtcgagagcacatatttcaggttctgctagggcattggccacgacattgttgcctccagcggcggcatggggagtaaggcatccaatcatgctttatccagcgtgggcagtgtcgcttaagcgacacagaaggcgaccatactccaccaaaacaactattaggcagagggcgatgcctacaccggcaccgccttcgcgtttacccagtgctatactgacacaataggtgcattcagcgacgtgcatggcagtcaggtgctggccgctatcggtggccaaatgcacttggcacaaagccttgtatcaccttttgcacaaaatttcattttgagttcatattcactttgaatcatattccggaattttcctttttttatatggagccaactatctactgccggccactgcgtgtacacggagccactgtggctccgtccttggagtttgaaaaatgcgcgggaaccttgactgctgtgtgtgtgccacatcactttgacaaactcagtacctaaatagaggccctgtgtaattctatatttgtttgttgtcagaattataagttgttgaccctttcttattgccgctactctctgtattgtgtgttctgttcaaaatttccgcgggaggtttgttgaaccgcccaagccaaatctccggccaatctccgtggccactaggattggttataggcacccgtttaagtacgaattagtcttgacatgcgggcacttggaccatatggtttgggcccggagattgagcaaatgacttgagttttgtatttggcgattggggcggggtctccaaaccgccgcgatttggaaaatttggccggaattcacaatactgacttactacaagcttggtatcccgcaacgtgccacttgtcgcagtaggtctcgctgtacactcatctaagtcaatatgtttgcagaagttgcgcgcaaatcttgagaactgcttgtacttcctgtgcgaggtacattaaaatatacagccgggactagcccggggacgcctgtattggaacgctcgcgcaatcaatacgaactccagcaacaacgttctcgaagtttaaaaaaattaagaaatagcctctaactagcgtaccgcagatttttctaggtttcatatcacaatcgtccttagtatggcgaccaagataattttttaaagcttattttattgtgctttacttcatttttgtctaaatgaagctctaactcgttgttttataatctaactcaatcttaatacggggataggaagcaacgttagtgctgctatcgcagaccaaatcggattatatccgtggtacgtcaagtcaaacaatgacccctcttgacatctaactggtgcattttcttgaaatcggtacgactccggtgccgtacagggccctccaaaaagtgtatatgcgtgggcagatcgaaccggcgcgctaccgacaacactggtgtagtgtggtgactcgtcccgcctctgagaaacacgagcaggatctgcggaacagcgtccaggtcgtgatcgacttgacggagtagctggtgtggcacgccgagcagcagttggtgacgaagactgtggggacggcggctagtggtgacggaagcgagccagtgggctaccgttacgtgcgacaggaggtagcagttgaagttgacggctgcagaagatcgcaaggcgaggtgacctgcgaacaggacagagaacgagtatgcagagaggagaggcgacgctggagagcgagtgtgaggccaggagaccacgaggaaggagatgagggcccgagagggagaggtccaagtaggctagaaggcgccgagtggataggatagggtagatcggcgggggttagaagtaagtgggggcagctcgaccctccgttgcgatttgttgctggatagtaacgagtcaagacttgtaatacactcagttgcgccgaaacgcgggttcctgtgacctagtaccagggaagcgtcttgcgaccagggaagtgtcggctagacacaggagtaagtggcataaggtaagcgatagtggcggacggtgcacagatgagggcaatgtattgagtagggtggcggagaagccgtgggggacgaggtgcactcctgacagcactttggccgtgaaggacagcggtttcgagtgcttgggcgtgcccgagtgccgtgacgaagatgctgttcgacctgtttacatgtccggtgggggtcgcctgtggcctgccggagcccaggttgattgtattggccctcccagccgtccctatccccgacacgcctggtgaaggggccagtacctgtctggtcgatcattgtactgcctcgcacctgctggcagtcggcgctatactggcccacctaggcgtggacacgacaacgataatggtgttcgtacgagtggtggacgcgtgcaacactatgggcgaccgggctagacgggacctggttatctgtggtggacgcggaacactacgggtggtcgggctggacgagacctggctacctgtagtaagggacgaccgggctggggatagacccggaagcttcctacactggtatgaatcattgtatgtattgagctgggtacgtatgaacgaaatgaagtaaatacgaacggtaagcgtttgtattttctacaagctcgaaacagatctcgaccaaggttcgcatttttaatttcgtaagtcattgccggtagacagtttgaactggcagatttccggacagatgctgcggctgtgaagcaggcgcaggagatgaccgtagctaataagacacatatattaaaaaaaataaagaagtggtttataccaaaattctcctatcccagccttcgcggagccctagttctttgttttatcataattcaacgatacccatttcgattccatcgcttgtcatttataataatagccgtcacaagattgaattgacttgagaaaacgtaagtctcggccgccgacgctttaatggagcgctccgattggctaaaatgacctgattagcgctggaccgaaagagggacggattcactagctgacagtacaagtacacttgaggtcacataagtcgttcggaaagacctcaagtgcaatgtatatccaagcggcaaatttattagcatatgcattccagataaatgtcggtgtttgggccgtgacaaccgaaaacaacatgaaaagctgaagccgaattacgacgacggagctaggcgcatccggaaaaggatcgcgttatgacttgagttaaacacgaagtgtgataagttcaaagttcgaacaaactgcggcggtcatcatgacccatgagcgcctactgcttggccactatcgcacagcgcgctcacctttcgcgatggtatccgtgagccttcgatcctatgtatggctactcctgccgatgatactccaccgagtagtggaccccctccactcattccttcggcgtgcagatagtgactgttgctactgtcattggttcggccatgagtgccacccgctccaagacaatgtctgccgacgtcgactcggccgagacggagaagacggtgacgtccacggaggcgagcgcggcggccgacaaggacatgagcggtgacgttcacccgtctgaggctacgctgtgacgtaccgctgaacaaatggcacgacgacgcgacccaacagcaggaacactctgcggagactaccgagagacggagacaataatgaacatgaaatgcaggatggcgtgggcctgtgttcggaaagtagttgcttaaccacaatggagcctggaggccgtcaaagcatctcattgcgttgaactctattcgcatacttaggtagatttattttgaccaataggagtctccgcttatcgttggctaccgccgcttacgctttcccggaaggatgcgatcctaactgcccaatagtggacctcagtcaatgtgtcgtactccaaggggtggaagtcaggggaagcactcacaattttaggcggaattagctctaaataagcgttggtcgcccttttatgtctctaattccgcctgaattaacagctcacccgccaaaatacgtgaaaagcacaataaaattttgtgcattttgttgcgatttgtacgggttttgtaattattagacacaggtgatatgagcgacgtccagctattatttgtttagtcactgtgcaaactacgcgcttcatcgttttccctctaaggctccacccgcaccctttatgctgtcgtttcctagtcgacgaagtctctggctgccttgcgagtttaagccagtgccatggacgactctggggccggatcgtctcagttttccaactaagctgcagctcgattagcgctagtcgccatggttcgacctgagcacgaatagcagttcttgatgccgttcagtgccctcaggccgaagaaactgcgttggtgaggcgcgaaaatcgtgtttcgtttgttagaccacaatcgtaaatacgccatagtgctcatctggatgattgctgcatttgattacgtttgctcaagtatttagcggaattttacgactgcgtatgtcgatttaaccgtgaaaaatactacaatcgtatttaacccactgcaacgtgtttagcacagctaaacttcataatacgggttaccaagacagtggacagggcagtagcggaacagaacatacgctcgccggcactgcaccttgtcctcattttctaaaatttcgaaaatcaaacttcccatacagtgaatcatgtacaggttggggtgtcacccctagctggtaacgcgatcattctttgctggtaaggcaatcaaaggaaacgccactgagcgttttttgttgtatacaaatatctagtgaagtaagcatccagcatgttgtcaacagctgcttgaacacacgtctagcagtggtgtaatgctcataaactggggtcgcaggatgcaggtcaagatcggcttgcacgaacgtacgaacgtgatgccagctgaaatgtgcgtaaacgggcgattgaagctgcactacagtggtaaacagagtgcttcctgtagaaacaacacacatgcaatcatcgttatcctgtctttatacagcctagtcccaggataatatgcagcttaattacaatgacaatatgcgacaacttttctcgccgcagagtgtcaggcaaagctctaccgtccttgtgctctgatggtgttgccttcaatctgtttttcatgtcggcatcactcgggcaacttctcagcaggtcgtagtccatctcgtacatggtgctgggctttcatgaagagaaaaccagacgtcttcagccgcactttgtcatgcccgcctgcaacccgtcatgaacgcatatgcgtattttacattctagcacttggtactttgtcgcggtgaaaacaccagctgacatgctccccgagcatggcgcgaccgggtatcctttcgcctaagaacgcatgctgtaagtactaagtcgacgcatggaatgctagggtaaattgcattgtcttccagtgtgggtataagctgttacttagaggctacctaaacggaatagcttcatttccgttgtccatacacaaccatcttgtgaaataagaagtttttccgcctcgttgacattccgcgcagactcgggcgggtctttgagtgattgctcgccaacacttcaatatcgcccccgggcgtgctcaaacgttcttggcactaaatccagctacgatccaacattttcgtcatctggagcacagtaaggcttcatggctcgatcgcgccaggctcagtcgttgttgttcgctatcaacttgttgacaagcccgctagcttcataaactgcacctgaaaaacgtattcaggaaaatgttcagtataagatgaagcttacagtacagtatagtacatccatgataacattcaacttacccgactcgcccagcgctgaaaccgcacgtgaatgatggttagttggttgcgtccgcagtaggagggtgctctcagccgcgtagttcatccgactgacgttggcggcgacagtgatacgagcaccactagctgcgcacgcggaagctgggttgaatccggggaggaatccgtaacaaagtcgaagaagaagaaatactggttctggtgtacgggttccgagtcgagacctgcatacagagcctataagcgcgtgagagactaccatataccaatacaatcatacgaattgcgctggactcacccatcgatttatcgccacggacaagtgtacgccgttggtgctgcttgcgtcgcctccagaccgcaggtagaagtagtggtcgtccagcccgtgcctagccttgctcccgcaggctagcagttaagcgcgattttccacgggcagttcctctgtcgacgtgtgctccgcgcgcgcaaattctcgaatgaggccgtttttcgaaaggcggcgagcggcaaagtgctggaccactcgtttggagtgtcccaaaatcttatagtattttatgcaaatcaggtggagtacggggaacctgctagatcccatattttgaattttgagaaaatctccgtccttttctatgttgcaaaagaaaggcgcgaacagagacccgaaaaagtttaaacataaagtttgtgtaccatgtagcaagggaaaatacaacccatacaaacttcaagtcaaaaatcgcttaaactgcatacatgcagattaagaaaaatcttaatccagcattagggttggaggggttaaagcaacctctctcgattagcaatttctgtctagtaccgaaggccacccaggacaaatgcaggacgcaactcaaaagccgcctgcagacatcagttcgagtcgtggagtggagtttagtgctagagctagaaaatccatttggtgaaatgtattcacgatagttgctctgaaatgtgccagcgtggtctgttgcggctagcagttgaaaatgggcggttggtcttatctcactggcttatggaggacattggcgttggaagtcgtggctttgcgaaagcggtcgtaactggtactttgacccctgcgtaaccaacagcgtgtgttaacgtggtggtttttgatgcgcacccggtttatagaagaatcatacaccacaatgctgttcactatgcgtctggcagcaattgtggctggcttatggcacataataataacggtgtagccgagcatttagtattattcgtgaatgcattactgaacaggacgagtctgtgccgaaatcttctgttcacaaagtcattttgaaggtggtagaagctgctccgacgcaacgtcgccgttcagcatcgttctcttccctgacaaacccaatcgattgacttcagcgtcgtcgatagtcgccatcaaccacttgcgcatcggactggtcgtctcctggatagctgtgcggatttttatctgcgaggtttcttgctcaaagcgtgtgtgcgtcaacagccaccacgcatagatttcgttttcgttcttgagtgtcgagagtagcagctccacacgatcgctttcacaaagccatcgagctaaatccacgtaactggacgaaagcataattctccttaccacatgtagcgataatgggacccccttctcaatcggtcaaggtattatcggtgtcacattacccgaaaagagcatcctctcgattgtcacctcgagcaatttcgacagatccatcttgtagccgccctctgatagccagaaggccacagttaggtacccatactccacagctagcccaggctcgcatatttcgaatcgattttgataaaaccacttcaccaaactcaagttgcctccagtgacagcattgcggatgcgcgcggtagatcgtagtttgaggccgaatctcttcatccagtccaaaatggctagaaaactccgtgaaagagcaacttccgccaaatattgaaggcagtggtgaacaaacttggggcgcatcttaaatgcggcgtggactgctctcacttgatcattttcctttcggtcgtgtgtagactccacgatggtaaagaacgtatcttctttcaggataaatgtctcaaagtgccggggttcccccgtaacatcgctagaaaactcctcggttctatgtgagattagccatagcacgacatcgaaatgcccattaaatgaagattttcacgagtggagcagtgaaaatagctttttagaaggaaggcaggaagttgaaaccaacgcagatgaagacgtagaacagcgttagtttcagacgtcctttacagcgctcacagctttagaaaagcgagccttcggctctctgcattcgcctcagcaacatgccgcgtctaacgtcgcgatcgacactgcatctcctgcctgaggacgtagcggcaggcgccttccctctcccattctatgcccgagtcgtcggtatagagggggacgaggtcaagttccgaagctttgacggggaagaaggagcgctttcgcggtcagtcgccgctcgccgaacagtcacgatagcggccgtgaacaagatggggagggtgtcgctgcttcgccggccagtggccgtcaccacgggagatccggagcccaagactttccatggtcaagtcgttggtgttgaggatcgcgaggtgacagtcgagtccgacggtacccaaatcgttgctcaagtcgacgcgatcaaggtggtggcgcctgtggtggctctacgtctgcagcatgtcgcgctcgacacgagcgagtggagttctgcggacgtcgacaacatgcagacggccatactatcgagggtattgggagaagggaataacgagggaagccggtctatcagctgtatacttagtggactgatcgacgaacagaatcatcccgagccgtctgcaatctgcaagtgggtggatcctcagtcgggatcagagacacaattttctctccaacacgcgctcgactacgccttctaatcgccggtgaagccggcggcacttggcgaatcgttttgccgcgcacacgacgaatatgtggtgtccaccggtacacaagaggtacaatgccaatctggcaataccgagtcatgtgaacttttcgaccccttcaacgatgatgacgacggttttccagatgcgtcggacccgatcgccagaccggttccagccactgtgcaagcagcaggatcaaaacgcagccaatccctccatggtaccagtgaggaagttgctgagcctccacaccaaagacgccgtaccacagaggccactgattatctccacaaggatgccctgattgtagcgaggctaagtcacgaccccgaactactcgaccgtttcctgaacctccgtgagcagtccaggactcaagcgtccagtgcatcagcagatgatgaagaaaaacaaccgctaccaccattgcaaggccaagagcacgaccaagaagtccaagtatgcgttttcgccacagcgagagcgccaggaagttcacgacaagctaacatcggagcgccacaaaggtaaggaccctgatacttatgtgcatagtcagatccgatccggtgccctgctttgcaagtctctccccggcgtgttgactcgcgcgtacgactaccagtttggcattgaaggtccctcgataatgcactgcagctttatggacagaaagaaacgtatggagtggatagactcgggcagtgccaatttctcgaacttttcggcgacagcggacttcgaaccagctccagcagccaccagcatcaacgacgttgttggtgcggtgcgcgttttccaggtgttcgcgcgcgaatactgcgtcactagcgcgattgagctggtggatgccatcattggatttattgaggccaagattatggctctgcgctgggaaccggaggacataccggcctttgtttactgggtgaacgacgttctcgaaagctaccaaaatgcagtcgcgtcttcggataaagatccgggtgctattcgacttcgatgcacgctggatgacccccttctgcttgaaatattgcaagaagtccaagaacggcgaattcagcaattagaacagatgagctcaacgagtagagcaccctttggcacggtcgaagcaacgcaggccatcccgggccgttccgcctcggcgagacagcgaggaaaaaggaaaggacacgaccccattccgaccaaagtgctgcaaaaacagccgaagcagaacgacacgcagggaggaagtcgccggctctgcatgcggtttctatcgaatgcagggtgtgatgccgatcttcatgaaggagctcacgacggccgggcccactttgttccgaaaacgctagacgccttggtcaaagtcgagatcgagaagcgcttcgatggactgaagctgcaatacaaacacttatgactacctgtggctgctcggtcgccatcggcacacatgacgctccgatccggttactccccaacgaagcctgccaacgttatatcgaatcgatcagaatgccgaataattgaatgcaaacccaagttgaacgacgctgagcctacccccgctgatgttcgttctcgtagtgcctttgcggcacctacaggcgatattagtgtggtcgctgtagaaaatctccgttccacgtcaatgtcatctctcacaacctgcactcgaatctcgaacgatgctgagccggcccccagcgttgatggttgggctaacatccacggaatgccccaagtattggctgctttggatgtcgcagaaatctccgttccagatcagacatcaaaatattacgcacggttgctcttaagaacgacgctgagcctgcccctagtgccactgcttggggtaacacatctgtgctgcctcaaatagtgactgctgtggatgctgcagaaaatctccgttcaacacctgagcaaagtcctcaccatcctaccacggcgtatgcatcgaattctattgcgcctcatcaagccaggatggctttcccatgataatgctgcgcatgcctacagctccaccgcttcgcagaatctggtatcactctcacgggagtctgctattaccatacagtatgagctggagttaaggcttcttcgaggcgaagctcgaatatcccagcttcaccgccactgggggctgcgacgatcgcatcctacttccgctgacaaatcggtcatcgacatggttgcgtgccgctcgctatcggagataattcgatcgagacagctaagcgtggagggcgcggcaaaattattgagaggcaaaactctacctgactgtagaccaaacaaggcgcttgacccggatcgtttgcggtatgtactacgtgggtacccacacttagacctcctgatcaatatcgccacgaaaggtatcgaggcacagtggggcgatggccccataccagttcggcctccacccaaaaaccacgggtcgtgtcgtcgacatctgaaagccgtcggtaaaagcatccgcgcaggccaagatagcgggcagtacatggttgtcgacgccgatatcctggagcgatggtcgaacgtaatctgcaccccactaggagcggttgagaagaaggacgtggatccctccgttgaagtgagaaccattcacgacctatcgaacccatttggtaattctacgaacgattaataccagaaaaagtcggtgccagccctcacttacgagccagtgactaatattgctcgacgtatcgaacacttggctacgcgtcatcgtggtgtccgcgtatgtatcctgaaaggcgatgtgaaaggtgcataccgacatctaatgtctatagcatctcaagtatttcgtatggcagctctggtgacagacctcaagattttactgatcgacttagcagccccctttggatggtccggatccccaccatttgatgggctgtttggacgtgccatccgaagataccgaacccttttttggctacgaatgggtagatgatcatattttagtcgagttggacgtcaatgatcggctacatctcgcagaagcaaccctacggcatgcgatgttagccgtgctaggaccccgatcaattaatgaggccaagttctcgaactggagcaccgaactcgtcgccctaggtctgctctggaacacggaaaagcgaacagtatcgatgccagctgacaaaatcgctaaggcgctacaacgagtaaatacgatgattcagcatcaagcagctacaacatcggatctacaaaaactcctagggtcgctaagacatgtgtcaacttgcttgcgggccgccaagccattttaccaacagctgcaagcacttgcagtcgccgcaccacggtttgcaaaagtaaaactctccgccggggcgaaggcggatctacgatggtttcaaaacatcctgggtcatgggaatttcgctgcgctacccctgagcatgttcggtgatcttccttcatccgatgtggaactgtacatggatgcttcaaacatgggtttggcgattctggaccctggcgcaaataaatttatccaagaaaaatttgacgaaaccgagactcttctaatcgccaacgatgacacgcatttcaacagcttctccattaatgtgcgggagcatctgtgcatcgcattggcactgtggacctggggttcgtcgtggtcgagcaattcgtccggccaaatgcttcacgtgaagtgctggagtgacaatatttcagcagtgcagtggagcaatcgactttcttcaaagaatgaactcagccaagaaatcaacagggcaattggtctagccgaagcctacttcaacttacgagtatcggtggagcatttaccagggtcgaccaacaccacggcagcatcgagggcctggacggatccttataaaactgtgtggaccaatttttctgtgtcgtgggaacagacagccgagccgccaatctttcgcaaactctacacgaacttctcgaaggacttcaatcccgctcactggcctcgtcatcaaacgttaaatactcagctacttggtcacagtgggtgcgatggtgcacggaaatgcgactgcctaaatcgttacccaaggacgaagagcgccattcatatcagctcgcacttttcgtaatctactgctggaaattcggatggaactcgtccgaaagaggcaactctacctccaccgtgccctccaaactctgccacatctcgtggtatcacaagcgcttcgtcggatgcaaagtcggactgtcccccggacaccagcttgctgtcgtcggcattcgcagagaagaccctccaaccaaccccaaggcccccgtcaccatgcatctcctcggaaaattgcacagctccctcgatttttcctgtgcccagcaccgagtcatctggggggcttcggtgctgggcttcttctttcttttgcgccgctccgagtatctagctgacggcacgagggataaagaatatgctattcaaaggtccgatgtacgcttcctggatgatcaaggccgcgaccaagaattgatcgatcgagtgaaaaaggttcaaattcgttttcgaggcagcaagactgaccagtttggcgatggatgtactcgtgtgctgggtcggtctggtcacgcccaatgctgcccagtaatggcgtgctggtatctcgttcagcatcacctttccattggtgcgaagtcggacactctactctgcaaagttacgcggacccacaacttacaagtccgagacctcgtcagtgctttgaaacacgcagctgaactcgttgggcacgaaccaaacagttacggctcccactcacttcgtagcggaggtgcctcagcactcttcaatgcgggctacgacagcttggccatcaagcttttcgggaggtggagatcggacgccgttgagcggtacacaagaatgagctcacaactaacagcacggatggcgggcgacatgatggccaaggcaacattgcagcgtaatcaaggggcaacctccacgccacaccccggctgtggaggcgctgcaatgtaattttcaacttttgtgccgggttcggcacgcccccaacaagtaagacgacgacgacgactgaaaagccgcttggtccatcgttgtagtcgtacatccttccgttcggttttcatgcaaccattgtacaatttcgagatgaccttgggtggcggcttcgtccatcacaaaaggtgacaacttgtcggaatagtgctcacgcagccattgcactacattcaggtgccgcacctaccaccgttcaaagtgtaccccgcgcgtgctggtactcatgtaaccacataatcacatccacgtggccatgtttggcagccttatccatgccattctgggcatataagaaatgcgcgtacaatagtcgttgaagaccatcaagacgctctgaccacgcctcgtttacagccaagctacggaaagcgcacgcagtattagtcgccattttatcatgcagccacttggctaccgcgaggtggtcagcgtcactgccaaatccaaagtatacgatgagcactctcctaaatcactctcgatacaccactgcataacctcaagatgcccatttcgtgctgcaccgtcaattgatattgtcatcatgtctaacaggccttccaatcccaacctatttagcatgtcgaggtgaccattttcagccgctttagctacacatttcgatagcactactatgcagcggtcacctttgacctcataaatccactccaccacatcaacgtggccacgtgaaatagctctcttaatcgcgtcagcaattggtcacgccataaagtcattgaacgacagctaaatgtccatttgctgctgcgtttcccatcgcgcttggtatatcataataatacttccaaacgttttctgcgtactcgcgagtaaattcgagcggatgcatccagattgaagtatcagatccacgttcatacaaccattggacgagagcaagatgtccgctacccgctgcaatctccaacgagtgtcgaaaatctccgttccatggtccacgcttgtcttcccgttcggttgccatccactcaaacacgtgaaggtagccgccttctgcagcgaaacggatagcatttctccagtctggagtagttcgcgacaaaataaactcgagagtttcctcagacgcgccttctttgcaagccgtattcaacatttctggatccaacgacgaaaacatgaagccatcaatgcattgttcgacatgaggtaggatcactggaaggcgatatcgacaggcgagccgcactgctgcgctgagtaggatcatcggtaccgctcctaattcgtccacggagggacgacccggaattaacatgggaattagctaactcggggcataattaaggtcgataacgggttagagatatgccagaattatcacggcagaagaagtgaaaggcacaataattgtactgacagtaaagcgtggttaacatcttgaaacaattctggagtagtcaatgtgccattaactcgagaaatcttactggagcaccatgcctgcatgcaatgttctggtctgtagataatcgaccacgaattcgtcgataagaaaattggggtaaatagcctccacacgctggcaagcccctgtcaatgatggtgttagctggcgatggcaacatctactgcgatgaggcttgcacgactttgaaaaattgccattgcgtcacctattggtcggattgatttctttcgagacgtaaagtcaactggttggcgtgaaagtaattgattctgggctactcgagactacatggagtaatattgaagactgcaacaactaactatttccacaaaaattggggtagctatttcagaatgagctcatttaaatttaaatttattgcggtttagtcggctaactgcactcgatactgcgcgctgctgcagcctcgcctacggatcgcatgttgaaacaacacgcgcccgcggtagtcgcccatacatgacagcacggatcacacagtcgcagagactgcgtcaccagtgctgtcgaggtcatatgcattatatgcagtaaagtaaagagcttgataccaaacacgctaggtcgtgccgtcggtaccaagttgttgatttcgttcgtcatgccagcgttcgccacgctcacaaatctggtctcttcgttcttggaggcggtgggacagttgcctttgagttctttgagttcgttgagtccattgctggcgtctcgttttgattcccaggttcacatccctcaaaagcgtttggcaatgtctttgagatcgttcattagcgtcgatggtgcagctgtactcccagtattctcggagggtaacccaggtacccaagaaaatcgactcatgcaacatcttggcctgccccatagtgtaggatgctgcctctgaccatactttgcttcctttcgtcatagttgggtaccgttaccatcctttgggggcttcgtagacggccagctgaaggcgatccaactgctgtcgaacagtagtccaccacgtgggttgttgagcattcacaatatcatgacaaagcagggatgacgttgttgactcctcctctgatggcgggtcaattatccattcgtcactgccgagggcctgctcccagtacgacttcgtactacttgaaatggagggtgcatttccgttcaatatgaaaacaccgattagaatcgtgcgttcatttgtttggaagacgtccgccatggtgcagctacgacgctgcacaacgaatgcctcggtacgcattgccagctggcctgccggtattttcacagtccaaacacagtcgcttgcttcaagtatcatgtgccctggtgagccaaagtacgtcacgacccaatacaccagtgagggttccccactctgactttcatagctgcgctgaaaactttcccaccattcttcagagcgaggaaggtagatatcatctatccaccaagtagtgatttcacgtggtggcgataatcccatcaggcccggaaattgatcgaaacagatactgcgctcaaatgaaatggctgaccaaccgggggtccactgggtaaggcacgcatcatataaaccaatctgtgtgtgataacacctcaccgcctctatcagccccacaggtatcatgcatcgcggagatcctcttggtcgattcggttcggcttcactttccaggagctggaggaatctgaggtctttagaaaacgcggcaggatcccctaaccagtcaagccattgagggtttaaccacatgccattgtctgctcgaatcatcgtcagccataaaaagttgctaggttcatttccgcaccagggtccccgctgctcgaggccacacgatgttcctatgtcgtgagctatagcaggtacaaaaatctcttgatccggtacccactcctgggagattagcgagcgatgcaaagtggttagcttggcggtcaattcctgaacgtattcacactccggttcaatgagtccaaaacgatggtcttgtgtgtcaacttcgccgcacgtggcgcatgaagccgaccatctactatcaaagcgattcttgacggcattggtgtgtagtacattggaccgagctctccagtaaaatcttcgtagcgattctgaccatttcccgttgtaaatcatcccaatttctccgtcttgcactgtttgtcgagctacgtctctctgctgttggttctgtatccaacgtcggtgctgatcttcgtaaccgcggcatttgaggtagcgcagcgtattgccaaaaatcaatgccccctcttcatctacaagcatgaaattaccaaacgctagccaagctgcatatgaagccatcatatccatgtgatggctccgccctgcagcaagatccacgcacgccagtgaatttcgccgctgccgtagcgaacccagacggctatcatcgacccatgagcagtcatggcactgctcagcgattttatctcaatgcgatgcacatctcggtatttaatatggccgagctggcccgatgcatgggctcgggccttctcaaaaatctggatagcgcttttgttgtcgcatatttgaactcccgtatcgccgtagagtaccagtcctgctaaaagcgcatggatctcgcatcgagttgaggtgatatcggggcggtgtattcgtagttggcccgtgacactgttaccccctggcgcttgtagcgcccatccaccttgtacattcgttgtgttcgcttcagcaacgctgccgtcaccagcttgaacaactagcgtctggtcaccctccttccacgcatattgcacgcttgccgcacgtgcattccccacgacagtatcatcaacgggtggcaatctgcaagatcgtgtcatacactgtgtatggtgccacaaaccacattcactgcaccattgttcgcctctgtgccgcccacaagctgtgcatgccgttgcaatctcaatgagagtcccatggatcaatgtactttcatagcggagccgactgcgcgccgctgcctcctgaagcaggcgcctatcgttggccccttgaatcccgtccacttgtgtcgtggtccacagaattattcgatctttcctgttgcgacgcctaggtagatatcttacgataacagggacgcacacagcttcgaactcgttgacaacggctctatgggtccgctcataccagatatcgctaccccgtggtcgctcataccaccagcggattgggatcactgttccaagctggtgacgggcgacatcgccaatttcacgatagcccagctcgtagtggtcaacacgtggtactgcgtcttgtgtatccagttgtactgcaataatccactcaccaacgccaattctcattttgtatgaggccaccccaggtgacaagcgctcacaaccaacaggtacgcgtaagtccaatgtgccctcgtggacgaggtggcatttccaatcttcataaagctggtctacacgtgcttttttcgctcctacccacttccttttcgctgcagtcccgctcttgttaataaacttgttccatatacccacacaaatcacccacaaagataagtttacagtccgagttccaattaactgcaactagtacactccggagctgcggtggtgtaatctcaatgagcggtcgatcgttagctcggagtgatctcactgcaggtgggtgagtccatttgacagcgaaacggagtggtggtttgagtgaggctgcaaatcgaatcaattgtgcttcccaggttcgcacttgggcgggaggtttgactggaagcacgagaggattgtcaggaagtcccgcgtgggtttgatatgcttctagccgctcaaccagcagatgatatactggtaactcgggtgagtttagaattcgaagcgcttcttgcattcggtgcacattcgcatcgagttcacagctttccaatcctactccattttgttggtcataaaacacttggcgcggagtcgaaaaggggagccgtaacaccgtccgagccacttgccggatgaatgtatctacgagagcggcagtagagattgcacctcccaaaatcattctgtaccacaaacgcacaccctgttgacaatgtaacggaattgcgctgatgacaaattcatgtgttggattcgttgcgcttcttgagtgagctgtagccatgtaggtgcaagtgtggcttcccacagattgcatccgccttgaaacataccaagatgcttgaatccttccgccggggctacaacttgaactggatgagggacgccaagtccatcgttgagttgtactgcctccagatgtgaattgttgtctgccagatacatcatgaaggacttcgccgcaccgaaaacaccccctgaaccgaattttcctgtaaacttattagttacatcggcccgagctgatatgcctcgctcggtcgtcgtaacatccaactggtcgtcgacgaagagcgtgctgctaatctcggttccctcgccgtgttggtgatgccggattttgactgagtccgaacagcgggcaagttgcctttgaaggcagtccatatagcaggctatgtgcagaatggatagaactgagccttgacctattccaaactcgcgtgctccagtagagatccatccaaaagccgtccttacatcgacgtgaccagggccaagaagatcaatcatgagttttctgggaatctctggcacaccaattccccgatagataagatccatgcaccattttggaattcggtcaaagcacttcaggcagtctttggataccattatcaagcgctcacgaagatctagagcacgttccgtcagtaaagtaaccagtagagctgcatcgacgacggttctatccgattgaaatccgtgttgcatttggctgatcggaataccaggctcaacgtagcgtttcacaacaagaaataagcggctagccaacgccgattgcacggtaatgggcctccaaggtggtagtcctttggagttatcgagcgtcgggtcgatgttagcgcacttaggaagaaaaatcatttgctttcgccgtaggataggtggagctctgcccagacggaggatcagctcaatgactcgcctctcgcggcttcggactatgtcaggtgcagcaatccacatctcctgtgaaatacctccataaccgggcgctacatgttgcttcagctgacgatcgacctccgcttgcatttcaggcgtgtagacatagttgttccacgccctgctttcatcttgccaatatgatgcaaaacggccaccctcaatgatatccggaacaatccattcacgagcgaaatcgggtaggtcctccacatcgtccattgacaatgtttccagataccgtggggactctgttttttcgttcgcagggatccagtcatcgaggagagtagttagttccctctgcacctcactccggtcctcagtgtatcgggtttccccagtgtccgtgactatcgcacttcgtattgctacgggcggagagcctcgacctagggtgctattcaaaaaaaaaaattatacctccgccggaaaaccagtcctgtcgttgcttctttagctgagctctgatttgagttgatctccagtttctccggatccgcatgactcgtttccagcacttaactcactcgagacccacatttgccactccgctaatgttgctgtcggaaccactgccatccgctgtagttcttcatgcaaatgatgtgtcgcgcgctcgtgcgcgcaggtggcctggctggattacccactttggccaaataattgcgttcgcagcgattaagagatcatcgacgccgacatcatccaaaacagacagctgggtcagctttcgtaattgtgccgtgcaccgattactgtatttgatgcaaacagagcgcgcaagtagtcgccgggactgatttgtttcccccatatttattttgcgctcgaatgcaggcagtggtgcatattctcaatagcccgctccaaccaatctagtatctcgtcgtccgtgctgctttcgtggtgccaacgagtaatatcccgggtactttaggtgtctggtcgtgggtgttgagccaaatctactcaacccgttggctggtaagatccggatcactgacaacaacaacatcctgattgtttgccaccatccacgcagccagctcttcattcatcttgcggcgtaagttccgatttatattggtagtgcagacacgtaccgccttctcatcgctccgaaaagcgttgtcatcatcacccatgtagtcgccagagtagtgttccctctgcaatatgctgcgtaggacagtgcttcgtgctggttcacctgtatttgcccatggcaaccgcaccggctgccatttccgacggcgcctgcctccccgctgatgacgcgctgttgtatgcacgccggccgcttgttggtctgcaattaccgacgcatcggtatcgctctctatactggtttccgaggtatacacgtcctcgccgccgacttctcctgtaggcattattcccgttacgcaggtcacatcttggcgtgatcgggctgaattcaccgtagcagcaccagtaatttgcacagccagcacgagcagcagcaacttcatccaccaccgaattccagtatacgtcctaagggagaccaagcctactggcgcgctgggcctcccgatccaaaattctgcaagcgttctccgagtgcagtcatttgttggtccattctgtcccccagtgccgccactgccgccttccagccggatgtaaactccttcaggacgtggtcggttcgctgctgttgctggtccagtttgtccagacggtgctcaatgtgctcagttcgtacgttcactaactccgccagcttggtgtcaatatactgctgcacgctgagttgctcgtatgtagctatagcatgatcactcgggcgggattcctgttgcgcgaccggctggacccccctttgcaatagctgattggatcgtttgttggttagcagtggacattcaaacttcaagtaaccgggtttttcacattcgtggcacttccgcggccgcttctcctcccactgtcgaagtgacaaagtaatattcctgaacttgaactgcgtcgtgccctcggggccaaatttattcagtatagctttcatctgctcctccgatgcacacacgccgattccaaaaagtggctgactgcctctgaactcaacgcggactttgccaagtccagtgtcctcaaaagcaccttcagtgtgtttcggtcgcatttcgattcggacaccaaagatcccaatcttgtacacctgcttaacactgcgtcgttggccaggacgatacatgacccctaggtcaggatcccattctgcgtacatgataggtttgagcagtagtgtacttgtcgggttgcaatgctgatacgatccatctgcctgcgagccaaggaaggctctgtatactgtattcgcactgtcttcactcgggaaaaacagtcgaaatgcgtatgctatctctggtgtagtgtacgcagcaagctgcaggcactcgcgcgcacaacgtcttccatcctgtcgtacaccgttcttgtcagcaaagaatccgtgcgattccaccaaaacatcacgcgccccccactgccgcagtgctacgcgtagttgtccgaacgaaacgcggttacagttgacatactccagttcattcagcgtaaggttcgtatttttccgtccggtgaacagcggctgcatccaaacctgcaccccctttacctctaaaaatcctggtttcagcatcaaccacagcgcgcggtccaacttgaccgggatccctgtcagactggtgacgtgcttcctgatccttcctgtccctttcttcacgctttcgacttcgttgagtttgttgtcctcgaaaagcactccgttagcgcggcaggttgccagaaggtaaaacccggttgggatcatatagggtacagatcagagaatggatcggtttttaatactaatttttgtattgaaaaacatatgtttcggcagtgaggagcgtagccatagcaaacccgcgcggggtgcccgcgaaacagggccgcgcggtatttgcggaggcgggcccagcgacgagcattccagcgaacggacccgttgccgcaactcggagttagttttctttttgcgggggggtctgggggtgcaacccccagtacaccttttagcacatcagatccaatctcagatctgtaccgtatatgcccccaactggaggttaccgttgtagaatccaatattacagtagagccaccaaaaaggtcgcctcgagagatgccctaacgcattttacttgaacgactactgcaacaacaaaaagaaagaggcttacgtcgaattccctgggaggagactcagaacgaagcgctgcaccgctgtagcagcacgtgagagcatgttgcacaccgcagtaaccatctccacaccacccgcgacaaactcgaatagtccggatttctcctcgacggtcaccatcgcgtccattgtcgcccagctcacacggtagtgaagcaccatcgtgttgaggatccgcccctcgctgactaacgtgaacgcgagacggttgtcccgcgggttcttgaggaagtagatcagcgggatctcgatcgccacgatcgtcaacgccgagctcaacagcaatccgccctcctcaagcagcagtttgacgttcaccatcgagtttccaggggcgttcttgacgtataccgccagagtctcatcgaggggggtattgagcgtcttgaatgacatcacgcatttcgatctcccaaccgagaagcaaaccgcgtgcttgttctgtaccaataccggatccgcactcaacgactcgatgcggtgcactacaacaaggtactgtcagcgttgaggctaagagtgcattaaccaagcttaactcaccgttgatatccagcgtcccattcatggcatgattcgtgcgccggtagacgccgaagccggcacggtagtcgccagtctgcactacgaacgatctactgaagtaggtttcccacgcgtccaggccctcgacacggctggttacccaccgaacaacgtgcgagtgtccgcctttcgcggcagcgtcggcaacttcgtcccagtctggggtcgctcttaggagaaagaactcgagcattcgctccgacgctccgccttcgcacgcagcattgaaagcggcttgccagcacgaaggcgcgaggaatccgtcgatgagctggaccacgtgaggcagcgacccgttggccagaggaagtcgagactggatgacgagttgggtggcagtgcgcggtgacatctttgcttgactggatcgtgtctgggccagcgagaaaaaatcggaatgagctctctacggctcgtaaaggaaggcgctttttagaatacttgcgtgttgttgtcgtaatgattcattactgtagatgtcttgggcgcaaatgtatatctatcttgaataatacttgcaagcgccaaacgtcttctgtatcatcttcagctccgttaccacagcaaaagatggcaaacacccgatcacccttcaacaatcattatttctttgttctcttcacggggcactggttgccgccttgtgtgctagcttcaccgcgtacaaatccagcgagaaggccttgtcgagtgccaaatcttccgtcgagatatgaggagagcagccgcccaacttggagatactcgagaccgacagcgagctttcgtgaatgatgtcactgaagtctatgctagcgggtagcaccagcaacgcggtatctgtttgcggctggtcggtctcctgcaagcccagcaaatcggcgaggtcagtgccagaacccccagcgagatcaatcactcggaatgacggtgaggttcttaacccagcaagcaggaagcggggaggcatgtaggtccttgcgaaaaccaggggtgccgtgccaataagagataagctgctgcccccttcaaagcggcaggtggacgtcaaccagttggcggtagatgcaccctgagcgttagcagcgatcgtggataaagacagcagcatcggcacgacgcctccttggtgtaacacgccgaaaaacagagtcaacgcgacgttgaacacagtccatagcagcaaaccaagcttgtgcgtcgtcaagaagcgcactacccccgttctgccgttcactgcagtgaatatatgcagcggaacgagagccggcaacagaaatctgggctcctggtgcggggcaagcgacaaacacaccaatggaaagaatacacacgcactgccgaaaaccgagcgatccgggtagcgcagaaacttcaccaggaagaccaaaaagactgggccaaacagcatcggcatgttgacggtcaggtgagtgaaccgcgggtgcacaccatggagctccagattgtcgtactgggcgttatatagcaggttattcaacggtgcgatcacggcatttccggcaatcttctgcaacatcgaccgatcccagtcaccctcaaacacttcggggcgaaagtagagcgtgtccactgcgatgaaacccactgaccaggtcaaaaacgcgagaagtccttgcacccccacagccaacgtccctaccaggcgacgcacaacagacggcccaacgacatccttcttgcgtgccgcgtgcaccagcaacgcgtcctgctggcgcaccagctccaccccaagtgggaagaaaaacaccggaaacgtaaaccgcgtgaagaatcccaacgccaagagactcccaagaagaaccgtctgcacgtgcaccaacccacacaaaactcgtcgatgctgtcgtccccaaccgtcaataacgaaacaaaatacatgtagtcagcacctcgttgaaataacaaataattatacgagaaaatgtcgtgtgaacctaccggattgactagaaacagcaccgcaaagcagagtgcaagcatcaacgtctcaaaagtattggagaacggtcggcagagaaacacgagcgtgggccacgagctggcgagcagcagcagggccttctcctgcttctcccttctaatctctggcttctgcgttctgctcaattgccccacgactccaaacaccaccgcgtccacagtgaaggacagcagacagagcaacgcccttggcgtcaccagcagcagccaccccgtaagtttcacgcctagcagctgcaacaccttgtacggcagccccgccaccagcgccctacacacaccagcataataaataacaattattgtttactatactataaaaaagttattataataattgcagacagcagcagctcacgggaagacgacggagcggttgggcgacggcagctggaactcccatggcacgtgcagctggcggcgcagcgcttcctcctcctgctgcatgggcagaaagtggctggccatgacctcctggctctggaagaactcgtccgggtgcaccatgcccagcagcagcacgctgcaggccacgcgcagcgccgccagcaccacatacagccgcagtctccccgtcatatcgtcaagagagccaaaccagttcggactctcaaactcgcgttttgattggctgtttttccgacttcaacaattttgaatctcccactatcacttggcgtttgtatgcctaatttcggatcccaatgctccgcaaatttcggatgatttgaactcctgctccgaaaatacgaggggcgccagtttttcgcgcccaaattcccgcccgacgttcgaacggcagcaccccgagcagctccattaagaccctgggacgcggcggctctccttcccccattcgaccgcagacccgagcccatggcggacgacgcgtactaccgccaggtggtggcgcagatgcagggcgagttccagcgcgcgctgcaggcgctggagaagcaggtgcaggcgctcacgaggcacaacgagctgctctcggccgagctggcgcagagcaagcgccactgcgcggacgaggccgcgcgccacaagacgcaggccgaggacgcggcgcggcgcgagcaggcgctggcgcaggagctggcggcgctcaagcgcctgctgcagcaggagcaggactactgggcgcgccacgaccaggcgggcaaggaggaccgcgaccgcctcacgcagcagctcgcgcaggcccaggccgacgcgctgcagcgccgcgagcagaaccgcgcgctgcgcaacgagatgcgcgcgctgcagagccgcgtggacacggccgtggccaccagccacagcttcgagcagcgcctgctggtcgtggtgcaggagaagcagcagagcgcgcaggagatggaggcgcagctggtccactacaagaagaagctgcacgagaagcgcgcgcagaacaagtacctgacgcaggcgctcgtgaggctgcaggagcagcggcagaagtcctcggacagcagcagcagcggctacggcagccccgtgacgaccgtgagctcgaggagctccaggacgacgacgatgacgcccgtgacgacagctacgacggacgtgaaggacacgacgatggcgtcgccggtcttgccggcgatgagtctggagaatgtgagtactacgaagcccgtggaggtgccggcgccggcacagcagcgacgtgtgcgcaagagggagatgggactgacgctgcctgaggagattaaggcggcggcggcgaacgtgacgacgtcgagcagaatgtacaagagtaagcggatggggtcgtctcgagcgggcacgtccccaacgtcgtcgtcgccggagatttctccgcggtcggcgaggtcagctccgtacaagcgcgcgccatcggtggcgactacgacgcctacggcgtcggatgggaacagttttaacagcaacagcagcagtggaagtctgcggagtatgcgcagtctgcgccacgtgacaggacgacggataaccagcaggaacagcagtgacagcgacaacattgacgttagccccaggacaagtgcaggtcacctccgagcaagcccgactggacgattggagcgtgaactgagtggcttgcgacgaaaactggactcatgcatggcagatgcagcggcccggtggtagatgacgagcgagattggatggcacgtgaaatggagcatttggcgtggcttggagtcggcgtttactgagaggcactcatttctgcctcttggtagtcaggctgggcacgctttgggactcattactcccgattggcaaacagcaccaaaccggaacgacgccatcatgccttgaccgagcattggaaacagggcttcgctagccacggagtgagacttgatgcttatggatttcgtatcaagcagcatggggtgacaggtggtgtgaagagaaagaggctcatttccctcttattctctcgacgaggttggaccaaggcgaacttcagagactcattactctctgttgaactctattccgtggatcgtcaattgttgaaggtttccgggtgtggtgttatcggagcttagcggaccttgctcggagacgcgtcagcaggctcagctgatcggggctcattacccccgttgaagctgcagatcctggcgtgcttcgtgtgagttgcaggtgtggtgcgcttccgtagttgtcgacgaggactcattactccttgtcgatctctatggctgccaccacgcccgcgttctgctgtggtttgatacccacgcttggagactttcacgtgcgacgtctgtggatttgatttctgctttgggcttaccaccaacgactcgagctctgctactctcatgacgcgccaagactattacgacttcgatcgattcctgatgatgaagcttacaagggaccagtaaggtgacaacatagcgctagtgctacgagtatgtgtagatagtatcgcgaaagacaaacactaaggggtatttattcaaccagcaatgggataaaacgttttctttcgagtgttcgtcctcgttcagagctactgtatcccttcacagcgacttgaagctgtataatcatcaccaaactacaaaaactaacgcacaaattatctaccacgttcatctcaaaggttacgtgtatccaggcgttagtctatcgttcctacagtcgctaacgtgttcttttacttccactcgacgccggatccttctccgtcctcgtttgggtggtcttcatcctcgaggtattccatgagttcactcgtgccgaacttgtccatgtactcgtcctcgctcatgtcgccgtagacgctgtgcttgtcgtccaccatgttctcccagtggtcctcgagcgccaggatccgcctcgtgtcggcgcgcatcaaatgcaccacgatgttgttgcagtccgcgatcatccagtcgtcgcagtcgcggccctccacggcgtagtcaaagtcgtccacgatctctcgggccttcatggacttgatgagcaggtcggccatgcggcgcatgtgggcctgggaccggccggtggcgaacaccataaagtcggccagactgctcttgccggccaggtccaccgtgtacacgtcgatggccttctcgcgctccagcgcctccttgacctcgtcgatggtcaagtaggtctgcgcaatgggcgggatgatgtcggcgtggcggttgccggcctcgggggcctgccactccacgtcctccggggactgttccagctgggcgtccgtctcgtcgccctcggggaagttgcggggcgcgtccaggtcgcagtagagcgtcacgagctcgtcgtaggccttggctgcgtccagcgccgtccagtagtcgccgccgctgatcacgtggccctcgagctccagctcggcgctgtacttcttcaccttggaggcgtcgtacaccacgcccaagtactggggcgcctcagcgtcggcaatagtctccgagtcggactcggtctcagtctctccgccttcgttgtcattgggagtctgcgagaagtggcgcgcgctcgagatctgcagcgggcgggcgatgagctgcgtgcgttggtggaggatggagcgaggcgcgaagacgcgcggggcgcgcgcaggcggtgaagctgcagatgctgcggcgcggagagcgcggcggacgagctgcgacctcatgttgatgatcctactttatctaaattgtgcactggtggtgaggagacgggagagttgactggggaattgtatggttgattagggtacatacaaaaattatagtccgggttgttgcagttggggcatagtcaaatttgcgttgtggcagttgaatgggcgtgaccaagatgggggaaatcttcttgtacaaaagggctctggtgcgtaactcggaaatctgtccagcggtttgggcgatcacgtcggccactgagatggaaaagctgtaccggtagtaccaactgccacttttgctttcgacagctcgcaaatgccaagcaatccacgcgagcggcaagtgcccgctacgccacggtgatggcgctgttcaagcaactgtattttagcgatcgtgtcgtcaataccttcgaacttcagcacaagctgaaggcttctgaagaacgccacgacacgatcgttcgcttcacttctcgcagcttcggccagctccttttgctcatcagcgcttggggcgaggcgtttttgacgaagcttacgcaccgctgtgccaacgtcgtctgcgtccgaaggacacagtttggcggaggatcgatggagctgcggcggtgttgtgctgagctgacaggtcaagtccacgcccaaaggttgtaagccgcaagttcgcacgcctcaacattgatgaagcacgcttcttttgacgactatatattttgcttttatcagagacagctatctacatgtaagtgcaacatctacacctgcttggtctaagcagattgacgggccatttactcgcagtgcttgtgttcgaagtcgtcggtcgttggggccggagtcggagtgctgtagtcaacagtcttggtcggagctgctgtgtattggctttgggtcgcagcgggggttgcagttggagtggtcgagtagcctccaacgggggtctgctgcgccttcgtctgggcgtcggcgtagtagtccgagtccatgtactgctccgtggaggtggtgggcacgtagtcgcgcttgatctcttggatgacgtcgtcgtccgcaaactcgacagcttcgggcttgaattcgtcggtcgtgcacgcaacgaccacgtcgccggtctcgatctcgtccaccttcttgccgcaaatggggcgagaagacgtcaggtggaagttctgcacgaagtcgtccgagaagtcctcgatgccgtgggccttgttgaacgcctcgcactcggcgtagtgcatctgctggatgacgaggtccatgttgccgtcgaagcgggcgtacagtccgtcgtacgtgacctgagtccactgccagtagtctcccgagttggcgtcggaaggcggcgcatacgtcgaactgtccgtggagctgtcggtagagttgtcggcgacgtagatgcccgagtgagtggggatctccgtcttgttgaagtagccgtagccggcatcgtcaggcgaatcgacgtaagctccaccatcactgctcgagttatcggagtatgagccactggagtacgagctatcggagtacgagcctcggaacgatccacttccactggcgctcgactcagagccactggagcccgaatcggaggcactggagcccgattcggaggcgatagcgcccgaatcagaggcactggagcccgattcggagccgctggaactgaacgaaggcgttgaggggttgtacgcggagcagatctggctgttgctcaggagttgctgcgtcacgatgtcggggagatcgtacgagtacgagtagtccccgagttgcgtcacgtctccgtagttccacatctcgctgccgacgtggctgaagtacttgccgagcgtcgggtgatcggcgatgtcgatggttttgccgttcacgaccacgttctgcacgattttggcgttggggccgatgcccgacacgccgtcgcacgtgtccgtcgccttggtgaacgccatggtagccgtcagcaattcctcttcagtcagaggcaccccgaagttgcacaggtgatacacgtgcaggtacatgtcgacagcagcgtgccacgagtagaagaaggtgtcacggggcgaggcaaaggtggccatggtgcccccgacagcgttgtgcacttcgttgtggactccgaattgaattccctcgaggaagtcggcgtagtcgtcggagctggtcacgacgctcaggaacgaggtaaacccggcacctgaaggcacgggtttcgtggtcatatcgctgcggacggtgtagccgcagacgttgttgtcatcgcactcggcgttcaatggggccccggtgacggggaacccgacagcactctgaccgttctgcgtaatccaaacctccttgttctgagctttgttgccgccgatttcttgcaggatactcgaacactggtacaagttgttgcactgacccgcagcctggcggacgtacgccgtctggacgtcgtaatacggcagtgtcacgcaagcgaatttcgagtcttggtcacgcaggtagctctccagtgcgagcaaaaggcggcggtgccacgagaagaaggcgcacgagcggtgggcctggaactcaccgttcggttcgacgtggatggcggcgaactccttgatcgcgccgttcttgatggcgacgtccatagcctcgaggtacaggctcttctcactgctcgtcatactcgaccaagccttgcggacccgttggccctgaccacaagcttcgttgccaccagcttgggaagcttcaatgctggtgctgcatagcgtcgcgacaagcagcagagtgacggatcggagaatggaaccgattcgcattgcgactcaacaggaagcacccgggcttggagagtggggggactgccaccgacggtgagagttggaaaatgaacatcgagctcaccaagatgttgcgtcgccaaagtgctgcgttgaagatgttgaacttggcctagagacaaaagagcagcgatgcaccccccacacttgagctgcaacgacgacacggttttggtggagcaggatgaactcgccaagtccttcaacgcgtatggcgccgtcgaaacaagtcgcagtaataggtgcaccgagattcctccggacagcgagcgcgagtaacctgaaatggttttgcgtcgcgaagcttccagtcggagcggtgacccagtggtaacgagcatggaggcatcggcttgcctgtcaggttgattgtagctcaataaaagttcgtgaaccgtacgcctcgagctgaagttcagtgaagtcgattgagcgggttcgaatggtggtggcatacttggttgtggtgttcctccggtccgccagctcatttctcttggatggagagcgttagctatgacggcctacaactcgccacaccaagtgtgagttagtcacaagacgctgccttggccaaaggatcactccttcatccttacccgattccatctgctacaagtcgttttagtggtggtgagtcgttttcacttcaacatgaaagtgttgatgaaggtttgagggccaatgctgccgctggcagcctgccggaaggtacacgtagggaaggctggtttgcaaggatggccgtggctctattgaactgaattatatacaagttatacacagtacgagggcagctctccttcatcgagagatgccgccttcactacagagtcgccatcatcttgacacatgcacaaaagcgtgttgtggactgcttacagcttgatggagtgcgtgacgggcgtcgccggctggctgtagtatccgctgggtgacgtgagctccgcgtcgctcgagcgcttgcggatgcggtaggcagtgaagccagccagagcaacaacagcgcacacggcggcgacgatggccggcacaccgccagcacccacgccgctagtcgagtcggtcgagtcgtccgaggcagtggtcgtggcagcgtacgaagtgctgaacgtcttgatcgacgacgaagcactctgttgggtctgctgcgtctgctgttcgaacgtgtagtcatcatcgtggttcgaagacgtggtcgtctcggtcttcgtgccagtcttggtgccagtcttcgtcggggtctcagtcttgggggttcccgtcttggtcggcaccgtggtagcggggacttccgtcgtagggcacggcgtaggggcatctgtggcagggacctcagtcgtggggtacggcgtgggagcctcagtcgacggcacctcagtggacggcacctcggtcgtggggcacggcgtgggagcttccgtcgagggcacctcagtggacggcacctcagtggacggcacctcagtggacggcacctcggtcgtggggcacggcgtgggggcctccgtggaaggcacctcggtcgtggggcacggcgtgggagcttccgtcgagggcacctcagtggacggcacctcggtcgtggggcacggcgtgggggcctccgtggaaggcacctcggtcgtcggcacctcagtcgtggggcacggcgtgggggcctcggtagacggaccggcagtcgtcggagcaggagtcgacgtcttggttgcctcgggggtcttctccgggcacggcgtagtcggagccggggtcgattccttcgtggtcggggcaggggtcgactcctttgtagtcggagccggcgtagccttgtccgtcgcggtcggggcaggggtcaattcctccttcttggtcggggcaggcgtagccttgtccgtcgtagtcgtcggggccggggtgggcgcgttcgtcttcgtctcggccgtcgtcggcgcgggggaggacttctccttctccgtggtcgtcggggcaggcgtcgacttgtcggtcttggtcggggcaggcgtgggcgcttccgtctcctcctccgtagtcttggtcggggccggggtggcagtctcctcgaagacgcatccccaggcgccagtcttgatcttcatgcacaccgcgtcctgaggggccacacacgagctcgagttcgtgtagctcgacaagttttcgtggcagtcctgaacggcaacgtcgcccttcacggggcacagcttgccggcaggcaggtcgccagatccgctgcagatgggtccctcaatgcagtacgtcgcgtctccctccaccgacacgtcgatgcacgtctccgactgcttcgtcgtagcggcaggggtggcgctgggcgtcgtcgcagccggggtagcactcggcttggcagtggtgctggtcttcgtagcagtgggcgtcgcttccggagccggggtagtggcagcgggcgtagctcccggagtcgtggccgcgggggtcgcgccaggcgtggtcacagcaggcgtagctcccggggtcttcgttccggtcgaggtcgaggtggacgagcccttgttcgaggagcccgacgtcgtggtctgagtcgtggggttgccagagttcgtcgaggtggacgtgctagtgcccgtcgtcgtagtcgaggcacccgagcccgtggtgaccgtcgtcgtcgtggctcccgagcccgtcgtcgtggtctcaatggagccgcccgatccggtctccgtgacctgaacagagccacccgaacccgtcgtcgtggtagtggtcttctcaccgctcgagccagtcgtcgtcgtgatcgtctcgccgttcgagcccgtcgtggtagtcgtgatcgtctcgccgttcgagcccgtcgtggtagtcgtgatcgtctcaccgttcgagcccgtggccgtcgtcgtctggcccgtggtagtcgtcgagctgccgccggtcgtcgttgaggtggacgtgcccgagttcgtggtggacgaagtcgtaccggagctcgtggttccgcccgtggtagtcgaagtcgaggtcgtaccagagttggtcgaggtcgtacccgagctggtgtttccgctcgtagtggacgaagtggtgccggagctggtagtgccgccggtggtggtcgaagtcgaggtcgtacccgagttcgtggtcgaggtaccagagttggtcgaggtcgtaccagagttggtcgtgccagaagtagtggtagagcccgtcgaagtggtcgatccagtcgtagtcgtcgaaccagtcgaaggggtcgagccagtcgtagtcgtcgagcccgtagtctttgtggtagagcctgacgtcgtagtggtggtcttgcccgtcgtcgtcgtcgaagctccagagccagtcgtgaccgtggtcgtcgtagcacccgaagccgtcgtggtggtcttgatggagccgccggagcccgtggtggtcgtcttgatggtaccgcccgatccagtggtcgttgtcgtgatggtctcgccgttcgaacccgtggtcgtcgtcgtcgtagagccctcctcggacgaggtggagctgcccgtctcgctcgtggtagccttcgaacccgtggtggagctcgagcccgacacgtccagctccgtggatccggaggacgcctccgacagggtctcggacacgttgttggccgtggtcgtcacggtcgtcgtgctgctcgtggtcgtaacagccgtcgagttcttggcgctctgctgcgtcgtgctcgtcgtgttggacgtgaggtagccggtgtccaccacggtcgtggacgtctcgtcattgcccgagccgctcgtggacgtgacggtgatgttgcccaacgcctcctgcgtcgagtcgagcgagctctgcaccttctgggtgtacgacttgcggatgtacgtcaccttgcgggtggtcacgcgcttgtaggacgtgcggattgtcttgatcaccgtggagctggcgaacttgaggctctgggccgagtacgacgtggagcgcacggccatctggagcaggcccgagcgcaccaggtccaggcgctggccacactcgacgcggcccgtgatcaggttcttgtccgtcacgaaggtggtcgagaagttggacaggccgtagacgctgtcgaacgtgtagcactcgagcagcttgaggtgcgtggccaccaggtccatgttgccctcgaagcgcgtgaacaggccgttgtaggccgtctgcagccaggcccagtaggcgcccgacgtggccacagacgccgtgacgttgcgggccacggagctcgcgcccaccgtcacgttcatgaccacgttggacgtgttggagtacgtggcgtccatgagggccgacgtcgacgatgtgatggccgagctcgagctcgagctgaccgagtagttggcgctcacgatgccgttgtgcttggtcgtgatggcgccgttgctgtagtacggcgtgtagcccgtgtagccgttggtgacgatggtgccctcgccgtaggccacgttgtcgttgctgaagttgcccaggtacgtgtacgggtagctgctcacgatctggccgctggtgaccgtggacttgcccgaggacgacgacgtgctgttggaccgggtgacgaccttggtcaccttggtggtcgtcaccttcttgccgttgacgatcttggtggtcttggtggtcgtggtcttggtggtcgtcttggtggtcgtcgtgctcttgacggccgcggcgttgagcgtcgtgtacgaggcggcgaacgcgcggttgaagcccgtgcacatgtcgttgttgctcaggatctgctggcgcagcacctccgggagctggtacgtgtacgagtagtccccgagctgctggatgtcggcgtagttccagttgtcgctgcccacgtagccgaagtactggcccagcgtcgggtgctgcgacgcgtccacgagctcgccgtccaccgagatgcgcatgatgagcgccgactcggcgtccacgccgtccacgccgccgcaggtctgcgtggcgttggcgtaggcctcaagggactcgacgacctgctcgtacgtgagcggcacgccgatgcggcacaggtggtacacgtgcaggtacatgtcgacggccgagtaccacgagtagtacagcacgtcgcgcgcggccgcggccgtggagaaggcgccgcccacggcgtccagcacctcgttgtgcacgccgtactggatgccctcgaggaaggacgcgtagtcgcccgacgaggccacgacgctctggaacgtgccgaagctggccgcgctgggcacgggcttgctggccaggtcgtcgcgcacgatgtagccgcaggtctcgtcgtcgtcgcacgacttctcgtagggcgcgccgctcacggcgtagcccgtgacgtccacgccgtcgaacgtgagcgtggcctcctcgtccgtcgagttgggcgcgccgccgatggcgccgaagatgccgctgcactcgaacatgttgctgcactggccgctcgcggcctgcacgtaggccgtgtgcacgtcgtagtagggcagcgtgaggcacgcgaagcgctcgtccaggtcgcgcaggtacgactcgtaggcgagcagcaggcggcggtgccagctgaagaaggcgcacgagtactcgccctgcgcctggcccaacgtgtcggccgcgatggccgagaactcggccacggtgccgtcggcgatggcgagctccgtggcctccaggtacagcgcctgctcgtcgctcgaaagcgcgccccagggcttgcgcacgcgcgcggacgagtcgcagaacgcgttgccgccgggcaggccggtcacgttgccggccgcgctgagcacggtcgggtagtacacgtccgtcgtggtggtggtggtctgcgccgcggagggcgcggccagcagcgccgcccccaatgccgccaacgcggagctgagtttcatagctactgcagctagtgtagctagtccgtcctcgtcctctggagtagaaggccagttggggaatgccaatggaggacaagcgcacccgagggtaatgcctccgtcgttgtggcaaatcagttgttgtccgagcggttgcgcctgaaggagttcagcgtccggctcgcgcgtgtcatcacggtatcttttggattcgtgcgagctcggacgtgggaatgaatacctgtctttatcgatcgtgcaccaagatgattcggaatgctgtgaacctgtatgaaacaatatcctatctgcaatgcaagctatgtgttactgtgtaaatggtaagtggtacggtaaattttggctcgtctgacgaataggagaaaaatcggggaagcgtcctagggggttggccgtcatcgctggaagcgcgccatgggctttcgatggagccgaaagcttactgttagttcatggttgcctcgcggtttgccttcggcgacgccgctttcgccgccgccagcgagagatgtctatctatcacctgtgtgcaatgctgctcgcgatctgtggcttggcgccatctggccagcgcacgttgaagcgagtccatctgtcggctggacgcacaatggatgctgccgatttttcgttggcctcgtttgcaggtttgcagaggctgtcccaacgcacgcacgctcgaaggcgcgcctataatggcgatcggtcaatcggcgagggtgctccacaatcgccacacagcatgaaggcacctcgctggaagcttggtaatacgcatgcatgccatgcgcatgccgtgggctgggtctcgatgcggtgcaattgccagcgctgcagagagctcggagcccgcggctgcaacagcgaaatggttggcaagttttcgtcgacttggcatttttcgccagtgcagtgtacgctactgtacatgcgcaatgtggctcgcagccacccaccgacacttgcccccgcggttgcacacgctgactcacgctagccggcccgatctcgggccggagcgttgccggcgataggctccgcccgtgtgggtgcgagcgagtccccttgtgccacgaaatcagagtccatcggccggatatcgctgggcgagtgcattgttggttggtgatcgccgaacgccgaagcttggcttcgagccaaactttctgagccaaagttttggatcggctctattttctgaatcgcattttgctgacggttctgtatttttcgagcatacaaaacccagtcaagcgtccatgcagagacggagctggtggcttcaacctgcacat
